(19) United States
(12) Patent Application Publication
(10) Pub. No.: US 2019/0359697 A1
(43) Pub. Date: Nov. 28, 2019

(54) CHIMERIC ANTIGEN RECEPTOR EFFECTOR CELL SWITCHES WITH HUMANIZED TARGETING MOIETIES AND/OR OPTIMIZED CHIMERIC ANTIGEN RECEPTOR INTERACTING DOMAINS AND USES THEREOF

(71) Applicant: THE SCRIPPS RESEARCH INSTITUTE, La Jolla, CA (US)

(72) Inventors: Travis S. YOUNG, La Jolla, CA (US); Leonard PRESTA, La Jolla, CA (US); David RODGERS, La Jolla, CA (US); Eric HAMPTON, La Jolla, CA (US); Timothy WRIGHT, La Jolla, CA (US); Peter G. SCHULTZ, La Jolla, CA (US); Eduardo LABORDA, La Jolla, CA (US); Elvira KHIALEEVA, La Jolla, CA (US); Sophie VIAUD, La Jolla, CA (US)

(21) Appl. No.: 16/343,353

(22) PCT Filed: Oct. 19, 2017
(86) PCT No.: PCT/US2017/057460

§ 371 Date: Apr. 18, 2019

Related U.S. Application Data
(60) Provisional application No. 62/410,315, filed on Oct. 19, 2016.

(51) Int. Cl. C07K 16/18; C07K 14/725; C07K 14/705; C07K 16/28; A61P 35/00

(52) U.S. Cl. CPC C07K 16/18; C07K 14/7051; C07K 14/70521; C07K 14/70578; C07K 16/2803; A61P 35/00; A61K 2039/507; C07K 2317/622; C07K 2319/33; C07K 2319/30; C07K 2319/03; C07K 2319/02; C07K 14/70517

(57) ABSTRACT

The present disclosure provides compositions, methods, kits, and platforms for selectively activating and deactivating chimeric receptor effector cells using humanized chimeric receptor effector cell switches that comprise a humanized targeting moiety that binds CD19 on a target cell and a chimeric receptor interacting domain that binds to a chimeric receptor effector cell and/or chimeric receptor effector cell switches comprising optimized chimeric receptor interacting domains. Also disclosed are methods of treating disease and conditions with such chimeric receptor effector cells and chimeric receptor effector cell switches.

### CROSS-REFERENCE

[0001] This application claims priority to U.S. Provisional Application No. 62/410,315, filed, Oct. 19, 2016 which application is incorporated by reference herein in its entirety.

### STATEMENT OF GOVERNMENT INTEREST

[0002] This invention was made with government support under grant number 1R01CA208398 awarded by the National Institute of Health. The government has certain rights in the invention.

### STATEMENT REGARDING SEQUENCE LISTING

[0003] The Sequence Listing associated with this application is provided in text format in lieu of a paper copy, and is hereby incorporated by reference into the specification. The name of the text file containing the Sequence Listing is CIBR_011_01WO_ST25.txt. The text file is 717 KB, was created on Oct. 18, 2017, and is being submitted electronically via EFS-Web.

### BACKGROUND

[0004] Immunotherapies are becoming attractive alternatives to chemotherapies, including immunotherapies that use adoptive transfer of genetically modified T cells to “reteach” the immune system to recognize and eliminate malignant tumor cells. Genetically modified T cells express chimeric antigen receptors, which generally consist of a CD3-zeta signaling endodomain, a transmembrane domain, and an extracellular single-chain variable fragment (scFv) derived from a monoclonal antibody which gives the receptor specificity for a tumor-associated antigen on a target malignant cell. Upon binding the tumor-associated antigen via the chimeric antigen receptor, the chimeric antigen receptor expressing T cell (CAR T-cell) mounts an immune response that is cytotoxic to the malignant cell. Such therapies can circumvent chemotherapy resistance and have been shown to be active against relapsed/refractory disease, resulting in sustained remissions for chronic lymphocytic leukemia (CLL) and acute lymphoblastic leukemia (ALL) patients. However, these therapies require further investigation and optimization, as they caused undesirable effects such as cytokine release syndrome (CRS), toxic lymphopenia, chronic hypogammaglobulinemia for hematological targets, fatal on target off tumor cytolysis for solid tumor targets, cerebral edema, persistent B cell aplasia with the use of anti-CD19 antibody expressing CAR T-cells, and, in some cases, death.

### SUMMARY OF THE EMBODIMENTS

[0005] The present disclosure provides compositions and methods for selectively activating and deactivating chimeric receptor effector cells (e.g., chimeric antigen receptor T cells), which may provide for a safer and more versatile immunotherapy than conventional CAR-T cell designs currently being tested in clinical trials by providing control over the therapy.

[0006] The present disclosure provides chimeric receptor effector cell switches (referred to as “switches,” herein), including humanized switches, and switchable chimeric receptor effector cells. The present disclosure also provides chimeric receptor effector cells comprising a humanized switchable chimeric receptor. The present disclosure also provides humanized CAR-EC platforms comprising one or more humanized chimeric receptor effector cell switch and one or more chimeric receptor effector cell comprising a humanized switchable chimeric receptor.

[0007] In some embodiments, the present disclosure provides a humanized chimeric antigen receptor-effector cell (CAR-EC) switch comprising: a chimeric antigen receptor-interacting domain (CAR-ID) that interacts with a chimeric antigen receptor on the CAR-EC; and a humanized targeting moiety that binds CD19 on a target cell.

[0008] The targeting moiety may bind a cell surface molecule on target cell.

[0009] In some embodiments, the present disclosure provides a humanized chimeric antigen receptor (CAR) comprising an extracellular domain, a transmembrane domain an intracellular signaling domain; wherein the extracellular domain comprises a humanized anti-GCN4 scFv comprising a sequence selected from SEQ ID NOS: 290-388, and 423. In some embodiments, the scFv comprises the amino acid sequence SEQ ID NO: 322. In some embodiments, the scFv comprises an amino acid sequence that is at least 50%, at least 60%, at least 70%, at least 80%, at least 85%, at least 90%, at least 95%, at least 96%, at least 97%, at least 98%, or at least 99% identical to SEQ ID NO: 322. In some embodiments, the CAR comprises a structure selected from structures A-H in FIG. 22A. In some embodiments, the CAR comprises a structure according to structure E in FIG. 22A. In some embodiments, the CAR comprises a sequence selected from SEQ ID NOS: 389-397, 401, 403, 405, 407, 409, 411, 413, and 415. In some embodiments, the CAR comprises the amino acid sequence SEQ ID NO: 411. In some embodiments, the CAR comprises an amino acid sequence that is at least 50%, at least 60%, at least 70%, at least 80%, at least 85%, at least 90%, at least 95%, at least 96%, at least 97%, at least 98%, or at least 99% identical to sequence SEQ ID NO: 411. In some embodiments, the extracellular domain comprises a hinge domain comprising a sequence selected from SEQ ID NOS: 93-103 and 165-168. In some embodiments, the extracellular domain comprises a hinge domain comprising an amino acid sequence: ESKYGPPCPPCPD; In some embodiments, the transmembrane domain comprises an amino acid sequence selected from SEQ ID NO: 398 and 417. In some embodiments, the intracellular signaling domain comprises (a) a CD3-zeta In some embodiments, the CD28 domain comprises an amino acid sequence that is at least 50%, at least 60%, at least 70%, at least 80%, at least 85%, at least 90%, at least 95%, at least 96%, at least 97%, at least 98%, or at least 99% identical to sequence SEQ ID NO: 418. In some embodiments, the CD28 domain comprises an amino acid sequence SEQ ID NO: 418. In some embodiments, the 4-1BB domain comprises an amino acid sequence that is at least 50%, at least 60%, at least 70%, at least 80%, at least 85%, at least 90%, at least 95%, at least 96%, at least 97%, at least 98%, or at least 99% identical to sequence SEQ ID NO: 419. In some embodiments, the 4-1BB domain comprises an amino acid sequence SEQ ID NO: 419. In some embodiments, the CD3-zeta domain comprises an amino acid sequence that is at least 50%, at least 60%, at least 70%, at least 80%, at least 85%, at least 90%, at least 95%, at least 96%, at least 97%, at least 98%, or at least 99% identical to sequence SEQ ID NO: 420. In some embodiments, the CD3-zeta domain comprises an amino acid sequence SEQ ID NO: 420. In some embodiments, the transmembrane domain comprises an amino acid sequence that is at least 50%, at least 60%, at least 70%, at least 80%, at least 85%, at least 90%, at least 95%, at least 96%, at least 97%, at least 98%, or at least 99% identical to sequence SEQ ID NO: 417. In some embodiments, the transmembrane domain comprises an amino acid sequence SEQ ID NO: 417.

[0010] In some embodiments, the present disclosure provides a humanized chimeric antigen receptor (CAR) comprising an extracellular domain, a transmembrane domain an intracellular signaling domain, wherein the extracellular domain comprises:

[0011] a. a humanized region that interacts with a chimeric antigen receptor switch; and

[0012] b. a hinge domain.

In some embodiments, the hinge domain is about one to about twenty amino acids long. In some embodiments, the hinge domain is greater than about 20 amino acids long. In some embodiments, the hinge domain is flexible. In some embodiments, the hinge domain is rigid. In some embodiments, the hinge domain is selected from an IgG4 hinge, an IgG4m hinge, a CD28 hinge, and a CD8 hinge. In some embodiments, the hinge domain comprises or consists of a sequence selected from SEQ ID NOS: 93-103 and 165-168. In some embodiments, the hinge domain comprises or consists of a sequence that is at least 50% homologous to a sequence selected from SEQ ID NOS: 93-103 and 165-168. In some embodiments, the extracellular domain comprises a humanized anti-GCN4 scFv. In some embodiments, the extracellular domain comprises a humanized 52SR4 antibody or an antigen binding portion thereof. In some embodiments, the humanized anti-GCN4 scFv comprises or consists of a sequence selected from SEQ ID NOS: 290-388, and 423. In some embodiments, the humanized anti-GCN4 scFv comprises or consists of a sequence that is at least 50% identical to a sequence selected from SEQ ID NOS: 290-388, and 423. In some embodiments, the humanized anti-GCN4 scFv comprises or consists of a sequence that is at least 50%, at least 60%, at least 70%, at least 80%, at least 85%, at least 90%, at least 95%, at least 96%, at least 97%, at least 98%, or at least 99% identical to SEQ ID NO: 322. In some embodiments, the CAR comprises a transmembrane domain selected from a CD8 transmembrane domain or a CD28 transmembrane domain. In some embodiments, the transmembrane domain comprises or consists of an amino acid sequence selected from SEQ ID NO: 398 and 417. In some embodiments, the intracellular signaling domain comprises (a) a CD3-zeta domain and (b) a CD28 domain; a 4-1BB domain; or a CD28 domain and a 4-1BB domain. In some embodiments, the CD28 domain comprises or consists of SEQ ID NO: 418. In some embodiments, the 4-1BB domain comprises or consists of SEQ ID NO: 419. In some embodiments, the CD3-zeta domain comprises or consists of SEQ ID NO: 420. In some embodiments, the region that interacts with a chimeric antigen receptor switch interacts with a chimeric antigen receptor binding peptide of the chimeric antigen receptor switch, wherein the chimeric antigen receptor switch further comprises targeting moiety that interacts with a cell surface molecule on the target. In some embodiments, the chimeric antigen receptor comprises a sequence selected from SEQ ID NOS: 389-397, 401, 403, 405, 407, 409, 411, 413, and 415. In some embodiments, the chimeric antigen receptor consists of a sequence selected from SEQ ID NOS: 389-397, 401, 403, 405, 407, 409, 411, 413, and 415. In some embodiments, the chimeric antigen receptor comprises or consists of an amino acid sequence that is at least 50%, at least 60%, at least 70%, at least 80%, at least 85%, at least 90%, at least 95%, at least 96%, at least 97%, at least 98%, or at least 99% identical to a sequence selected from SEQ ID NOS: 389-397, 401, 403, 405, 407, 409, 411, 413, and 415. In some embodiments, the chimeric antigen receptor is encoded by a sequence selected from SEQ ID NOS: 400, 402, 404, 406, 408, 410, 412, 414, and 416. In some embodiments, the chimeric antigen receptor is encoded by a sequence that is at least 50%, at least 60%, at least 70%, at least 80%, at least 85%, at least 90%, at least 95%, at least 96%, at least 97%, at least 98%, or at least 99% identical to SEQ ID NOS: 400, 402, 404, 406, 408, 410, 412, 414, and 416. In some embodiments, the amino acid sequence of the humanized region comprises or consists of SEQ ID NO: 322. In some embodiments, the hinge domain comprises or consists of the amino acid sequence ESKYGPPCPPCPD. In some embodiments, the transmembrane domain comprises or consists of SEQ ID NO: 417. In some embodiments, the intracellular domain comprises a CD3-zeta signaling domain that comprises or consists of SEQ ID NO: 420. In some embodiments, the intracellular domain comprises a costimulatory domain that comprises or consists of SEQ ID NO: 418 or 419. In some embodiments, the intracellular domain comprises a first costimulatory domain that comprises or consists of SEQ ID NO: 418 and a second costimulatory domain that comprises or consists of SEQ ID NO: 419. In some embodiments, the chimeric antigen receptor comprises or consists of amino acid sequence SEQ ID NO: 411. In some embodiments, the chimeric antigen receptor comprises or consists of an amino acid sequence that is at least 50%, at least 60%, at least 70%, at least 80%, at least 85%, at least 90%, at least 95%, at least 96%, at least 97%, at least 98%, or at least 99% identical to a sequence SEQ ID NO: 411.

[0013] In some embodiments, the present disclosure provides a humanized chimeric antigen receptor-effector cell (CAR-EC) switch comprising:
[0014] a. a chimeric antigen receptor-interacting domain (CAR-ID) comprising a GCN4 derivative peptide that interacts with an anti-GCN4 chimeric antigen receptor on the CAR-EC; and
[0015] b. a targeting moiety;

[0016] wherein the targeting moiety is a targeting antibody, or an antigen binding portion thereof, which comprises a light chain sequence selected from any one of SEQ ID NOS: 17-25, 27-35, 247, 249, 251, 253, 255, 257, 259, 261, 263, 265, and 267. In some embodiments, the targeting antibody, or the antigen binding portion thereof, comprises a heavy chain sequence selected from any one of SEQ ID NOS: 2-15, 248, 250, 252, 254, 256, 258, 260, 262, 264, 266, and 268.

[0017] In some embodiments, the present disclosure provides a chimeric antigen receptor-effector cell (CAR-EC) switch comprising:
[0018] a. a chimeric antigen receptor-interacting domain (CAR-ID) comprising a GCN4 derivative peptide that interacts with an anti-GCN4 chimeric antigen receptor on the CAR-EC; and
[0019] b. a targeting moiety;

[0020] wherein the targeting moiety is a targeting antibody, or an antigen binding portion thereof, which comprises a heavy chain sequence selected from any one of SEQ ID NOS: 2-15, 248, 250, 252, 254, 256, 258, 260, 262, 264, 266, and 268. In some embodiments, the targeting antibody, or the antigen binding portion thereof, comprises a light chain sequence selected from any one of SEQ ID NOS: 17-25, 27-35, 247, 249, 251, 253, 255, 257, 259, 261, 263, 265, and 267. In some embodiments, the targeting moiety is a scFv. In some embodiments, the targeting moiety comprises a light chain sequence of SEQ ID NO: 30 and a heavy chain sequence of SEQ ID NO: 7. In some embodiments, the targeting moiety comprises a heavy chain sequence that is at least 85%, 90%, 95%, 96%, 97%, 98%, or at least 99% identical to SEQ ID NO: 7. In some embodiments, the targeting moiety comprises a light chain sequence that is at least 85%, 90%, 95%, 96%, 97%, 98%, or at least 99% identical to SEQ ID NO: 30. In some embodiments, the targeting moiety comprises a light chain/heavy chain sequence pair selected from (i) SEQ ID NO: 30/SEQ ID NO: 7; (ii) SEQ ID NO: 30/SEQ ID NO: 6; (iii) SEQ ID NO: 34/SEQ ID NO: 6; and (iv) SEQ ID NO: 34/SEQ ID NO: 7. In some embodiments, the targeting moiety comprises a light chain selected from any one of SEQ ID NOS: 17-25; wherein the CAR-EC switch comprises a CAR-ID that is a GCN4 peptide selected from any one of SEQ ID NOS: 26, 36, 139-163 and 245; and wherein the CAR-EC switch is a LCNT switch.

[0021] In some embodiments, the present disclosure provides a chimeric antigen receptor-effector cell (CAR-EC) switch comprising: a chimeric antigen receptor-interacting domain (CAR-ID) comprising a GCN4 derivative peptide that interacts with an anti-GCN4 chimeric antigen receptor on the CAR-EC; and a targeting moiety. In some embodiments, the GCN4 peptide derivative comprises a sequence of Structure I: X1 NYHLENEVARLKX2X3 (SEQ ID NO: 269), wherein X1, X2, and X3 are optionally any amino acid or absent. In some embodiments, the GCN4 peptide derivative consists of a sequence of Structure I: X1 NYHLENEVARLKX2X3 (SEQ ID NO: 269), wherein X1, X2, and X3 are optionally any amino acid or absent. In some embodiments, X1 is K or absent. In some embodiments, X2 is selected from K, A, and G. In some embodiments, X3 is selected from L, A, and G. In some embodiments, the GCN4 peptide derivative comprises a sequence selected from any one of SEQ ID NOS: 26, 36, 139, 145, and 154-163. In some embodiments, the GCN4 peptide derivative comprises a sequence selected from any one of SEQ ID NOS: 26, 36, 139-163 and 245. In some embodiments, the GCN4 peptide derivative consists of a sequence selected from any one of SEQ ID NOS: 26, 36, 139, 145, and 154-163. In some embodiments, the GCN4 peptide derivative consists of a sequence selected from any one of SEQ ID NOS: 26, 36, 139-163 and 245.

[0022] In some embodiments, the targeting moiety is a targeting polypeptide. In some embodiments, the targeting polypeptide is a targeting antibody or antibody fragment that binds an antigen on the target cell. In some embodiments, the targeting antibody or antigen binding portion thereof is humanized.

[0023] In some embodiments, the cell surface molecule is CD19. In some embodiments, the cell surface molecule is Her2, CLL1, CD33, CD123, EGFR, EGFRvIII, CD20, CD22, CS1, BCMA, CEA or a fragment thereof. In some particular embodiments, the targeting moiety specifically binds CD19. In some particular embodiments, the targeting moiety specifically binds Her2, CLL1, CD33, CD123, EGFR, EGFRvIII, CD20, CD22, CS1, BCMA, CEA or a fragment thereof.

[0024] In some particular embodiments, the targeting moiety is an anti-CD19 antibody, or an antigen binding portion thereof. In some embodiments, the targeting moiety comprises or consists of a humanized anti-CD19 antibody, or an antigen binding portion thereof (e.g., any one or more of the humanized anti-CD19 antibodies or antigen binding portions thereof disclosed herein). In some embodiments, the targeting moiety comprises or consists of a humanized FMC63 antibody, or an antigen binding portion of a humanized FMC63 antibody. In some embodiments, the targeting moiety comprises or consists of an anti-CD20 antibody, an anti-CD22 antibody, an anti-EGFR antibody, an anti-EGFRvIII antibody, an anti-Her2 antibody, an anti-CS1 antibody, an anti-BCMA antibody, an anti-CEA antibody, an anti-CLL1 antibody, an anti-CD123 antibody, or an anti-CD33 antibody. In some embodiments, the targeting moiety comprises or consists of a humanized anti-CD20 antibody, a humanized anti-CD22 antibody, a humanized anti-EGFR antibody, a humanized anti-EGFRvIII antibody, a humanized anti-Her2 antibody, a humanized anti-CS1 antibody, a humanized anti-BCMA antibody, a humanized anti-CEA antibody, a humanized anti-CLL1 antibody, a humanized anti-CD123 antibody, or a humanized anti-CD33 antibody.

[0025] In some embodiments, the targeting moiety (e.g., a humanized targeting moiety), is selected from the group consisting of: an immunoglobulin, an Fc null immunoglobulin, and a Fab, and fragments thereof.

[0026] In some embodiments, the humanized targeting moiety comprises a light chain sequence selected from the group consisting of SEQ ID NOS: 16-25. In some embodiments, the humanized targeting moiety comprises a light chain sequence selected from the group consisting of SEQ ID NOS: 27-35. In some embodiments, the humanized targeting moiety comprises a heavy chain sequence selected from the group consisting of SEQ ID NOS: 1-15. In some embodiments, the humanized targeting moiety comprises a light chain sequence selected from any one of SEQ ID NOS: 17-25, 247, 249, 251, 253, 255, 257, 259, 261, 263, 265, and 267. In some embodiments, the targeting moiety is a targeting antibody, or an antigen binding portion thereof, comprises a heavy chain sequence selected from any one of SEQ ID NOS: 2-15, 248, 250, 252, 254, 256, 258, 260, 262, 264, 266, and 268. In some embodiments, the targeting moiety is targeting antibody, or an antigen binding portion thereof, which comprises a light chain sequence selected from any one of SEQ ID NOS: 27-35. In some embodiments, the CAR-EC switch comprises a light chain sequence of SEQ ID NO: 30 and a heavy chain sequence of SEQ ID NO: 7. In some embodiments, the CAR-EC switch a light chain sequence that is at least 85%, 90%, 95%, 96%, 97%, 98%, or at least 99% identical to SEQ ID NO: 30 and a heavy chain sequence that is at least 85%, 90%, 95%, 96%, 97%, 98%, or at least 99% identical to SEQ ID NO: 7. In some embodiments, the CAR-EC switch a light chain/heavy chain sequence pair selected from (i) SEQ ID NO: 30/SEQ ID NO: 6; (ii) SEQ ID NO: 34/SEQ ID NO: 6; and (iii) SEQ ID NO: 34/SEQ ID NO: 7.

[0027] In some embodiments, the humanized targeting moiety comprises a light chain sequence that differs from SEQ ID NO: 35 in from about one to about twenty amino acids. In some embodiments, the humanized targeting moiety comprises a light chain sequence that is identical to SEQ ID NO: 35 except that it comprises a substitution of one or more of the SEQ ID NO: 35 light chain amino acid residues selected from the group consisting of T7, T8, L15, S22, D41, G42, T43, V44, Y71, S72, N77, E79, Q80, 183, F87, and G100.

[0028] In some embodiments, the humanized targeting moiety comprises a heavy chain sequence that differs from SEQ ID NO: 15 in from about one to about thirty amino acids. In some embodiments, the humanized targeting moiety comprises a heavy chain sequence that is identical to SEQ ID NO: 15 except that it comprises a substitution of one or more of the SEQ ID NO: 15 heavy chain amino acid residues selected from the group consisting of E1, K3, A13, Q16, S17, V20, R42, L48, S61, A62, L67, 170, K71, N73, S76, V78, F79, M82, N83, L85, Q86, T87, D88, 192, K97, and 5115.

[0029] In some embodiments, the targeting moiety comprises a targeting antibody, or an antigen binding portion thereof, which comprises a light chain sequence disclosed herein. In some embodiments, the targeting moiety comprises a targeting moiety that is a targeting antibody, or an antigen binding portion thereof, which comprises a heavy chain sequence disclosed herein. In some embodiments, the targeting moiety comprises a targeting antibody, or an antigen binding portion thereof, which comprises a light chain sequence and a heavy chain sequence disclosed herein. In some embodiments, the targeting moiety comprises a targeting antibody, or an antigen binding portion thereof, which comprises a light chain sequence selected from any one of SEQ ID NOS: 17-25, 247, 249, 251, 253, 255, 257, 259, 261, 263, 265, and 267. In some embodiments, the targeting moiety comprises a targeting antibody, or an antigen binding portion thereof, which comprises a heavy chain sequence selected from any one of SEQ ID NOS: 2-15, 248, 250, 252, 254, 256, 258, 260, 262, 264, 266, and 268. In some embodiments, the targeting moiety comprises a targeting antibody, or an antigen binding portion thereof, which comprises a light chain sequence selected from any one of SEQ ID NOS: 27-35. In some embodiments, the targeting moiety comprises a heavy chain sequence selected from any one of 2-15, 248, 250, 252, 254, 256, 258, 260, 262, 264, 266, and 268. [0022.] In some embodiments, CAR-ID comprises a peptide. In some embodiments, CAR-ID comprises a peptide selected from a yeast transcription factor GCN4 peptide, a variant GCN4 peptide that does not dimerize; a flag tag peptide; a non-naturally occurring peptide, a naturally occurring peptide, a synthetic peptide tag, an alpha helix-forming peptide, a K4 peptide, and an E4 peptide. In some embodiments, the GCN4 peptide derivative comprises a sequence of Structure I: X1 NYHLENEVARLKX2X3 (SEQ ID NO: 269), wherein X1, X2, and X3 are optionally any amino acid or absent. In some embodiments, the GCN4 peptide derivative consists of a sequence of Structure I: X1 NYHLENEVARLKX2X3 (SEQ ID NO: 269), wherein X1, X2, and X3 are optionally any amino acid or absent. In some embodiments, X1 is K or absent. In some embodiments, X2 is selected from K, A, and G. In some embodiments, X3 is selected from L, A, and G. In some embodiments, the GCN4 peptide derivative comprises a sequence selected from any one of SEQ ID NOS: 26, 36, 139-163 and 245. In some embodiments, the GCN4 peptide derivative consists of a sequence selected from any one of SEQ ID NOS: 26, 36, 139-163 and 245.

[0030] In some embodiments, CAR-ID comprises a small molecule. In some embodiments, the small molecule is a hapten. In some embodiments, the hapten is FITC.

[0031] In some embodiments, the present disclosure provides a kit comprising a CAR-EC switch disclosed herein and a “complementary” chimeric antigen receptor (CAR) expressed on a CAR-EC. In some embodiments, the kit comprises (i) a humanized CAR-EC switch comprising: a CAR-ID that interacts with a chimeric antigen receptor on the CAR-EC and a humanized targeting moiety that binds CD19 on a target cell and (ii) a complementary CAR expressed on a CAR-EC. In some embodiments, the kit comprises a CAR-ID selected from a yeast transcription factor GCN4 peptide or derivative thereof, a variant GCN4 peptide that does not dimerize; a flag tag peptide; a non-naturally occurring peptide, a naturally occurring peptide, a synthetic peptide tag, an alpha helix-forming peptide, a K4 peptide, and an E4 peptide. In some embodiments, the CAR-ID is FITC.

[0032] In some embodiments, the present disclosure provides a kit comprising a first humanized CAR-EC switch selected from any one of the CAR-EC switches disclosed herein and a first CAR-EC. In some embodiments, the first CAR-EC comprises a humanized CAR. In some embodiments, the humanized CAR is selected from any one of the humanized CARs disclosed herein. In some embodiments, the humanized CAR is selected from SEQ ID Nos 389-397, 401, 403, 405, 407, 409, 411, 413, and 415. In some embodiments, the CAR-EC switch comprises a light chain sequence selected from any one of SEQ ID NOS: 17-25, 27-35, 247, 249, 251, 253, 255, 257, 259, 261, 263, 265, and 267 and a heavy chain sequence selected from any one of SEQ ID NOS: 2-15, 248, 250, 252, 254, 256, 258, 260, 262, 264, 266, and 268.

[0033] In some embodiments, the present disclosure provides a kit comprising (i) a CAR-EC expressing a CAR comprising an anti-GCN4 extracellular region (e.g., an anti-GCN4 antibody or a GCN4-binding portion thereof, disclosed herein) and (ii) a CAR-EC switch comprising: a CAR-ID comprising a GCN4 derivative peptide that interacts with the anti-GCN4 CAR on the CAR-EC; and a targeting moiety. In some embodiments, the GCN4 derivative is selected from any one of the GCN4 derivatives disclosed herein. In some embodiments, the GCN4 derivative does not dimerize. In some embodiments, the targeting moiety comprises a targeting moiety selected from the targeting moieties disclosed herein. In some particular embodiments, the targeting moiety is an anti-CD19 antibody, or an antigen binding portion thereof. In some embodiments, the targeting moiety comprises or consists of a humanized anti-CD19 antibody, or an antigen binding portion thereof (e.g., any one or more of the humanized anti-CD19 antibodies or antigen binding portions thereof disclosed herein). In some embodiments, the targeting moiety comprises or consists of a humanized FMC63 antibody, or an antigen binding portion of a humanized FMC63 antibody. In some embodiments, the targeting moiety comprises or consists of an anti-CD20 antibody, an anti-CD22 antibody, an anti-CD23 antibody an anti-EGFR antibody, an anti-EGFRvIII antibody, an anti-Her2 antibody, an anti-CS1 antibody, an anti-BCMA antibody, an anti-CEA antibody, an anti-CLL1 antibody, an anti-CD123 antibody, or an anti-CD33 antibody. In some embodiments, the targeting moiety comprises or consists of a humanized anti-CD20 antibody, a humanized anti-CD22 antibody, a humanized anti-EGFR antibody, a humanized anti-EGFRvIII antibody, a humanized anti-Her2 antibody, a humanized anti-CS1 antibody, a humanized anti-BCMA antibody, a humanized anti-CEA antibody, a humanized anti-CLL1 antibody, a humanized anti-CD123 antibody, or a humanized anti-CD33 antibody.

[0034] In some embodiments, the kit comprises a CAR-EC switch comprising a targeting moiety that is an FMC63 antibody, or a CD19-binding portion thereof, which comprises (i) a light chain sequence selected from the group consisting of SEQ ID NOS: 16-25 and (ii) a heavy chain sequence selected from the group consisting of SEQ ID NOS: 1-15. In some embodiments, the targeting moiety comprises a targeting antibody, or an antigen binding portion thereof, which comprises a light chain sequence disclosed herein. In some embodiments, the targeting moiety comprises a targeting moiety that is a targeting antibody, or an antigen binding portion thereof, which comprises a heavy chain sequence disclosed herein. In some embodiments, the targeting moiety comprises a targeting antibody, or an antigen binding portion thereof, which comprises a light chain sequence and a heavy chain sequence disclosed herein. In some embodiments, the targeting moiety comprises a targeting antibody, or an antigen binding portion thereof, which comprises a light chain sequence selected from any one of SEQ ID NOS: 17-25, 247, 249, 251, 253, 255, 257, 259, 261, 263, 265, and 267. In some embodiments, the targeting moiety comprises a targeting antibody, or an antigen binding portion thereof, which comprises a heavy chain sequence selected from any one of SEQ ID NOS: 2-15, 248, 250, 252, 254, 256, 258, 260, 262, 264, 266, and 268. In some embodiments, the targeting moiety comprises a targeting antibody, or an antigen binding portion thereof, which comprises a light chain sequence selected from any one of SEQ ID NOS: 27-35. In some embodiments, the targeting moiety comprises a heavy chain sequence selected from any one of SEQ ID NOS: 2-15, 248, 250, 252, 254, 256, 258, 260, 262, 264, 266, and 268.

[0035] In some embodiments, the kit is used for treating a subject in need thereof. In some embodiments, the subject is treated with the kit for a disease or condition for which CD19+ cells are implicated in pathology. In some embodiments, the kit is used to treat a subject for a disease or condition selected from heterogeneous tumors and blood cell malignancies. In some embodiments, the subject is treated for a disease or condition selected from acute lymphoblastic leukemia, acute myloid leukemia, and chronic lymphocytic leukemia. In some embodiments, the subject is treated for a disease or condition selected from multiple myeloma, Hodgkins lymphoma, Non-hodgkins lymphoma (NHL), Diffuse large B cell lymphoma (DLBCL), Follicular lymphomas, Mantle cell lymphoma (MCL), Burkitt lymphoma, and Hairy cell leukemia (HCL). In some embodiments, the subject is treated for a disease or condition for which CD19+ cells are implicated in pathology comprising administering an anti-CD19 CAR-EC switch and a CAR-EC expressing a complementary CAR. In some embodiments, the kit is used for (i) treating a subject for a disease or condition for which CD20+ cells are implicated in pathology; (ii) treating a subject for a disease or condition for which CD22+ cells are implicated in pathology; (iii) treating a subject for a disease or condition for which CD33+ cells are implicated in pathology; (iv) treating a subject for a disease or condition for which CEA+ cells are implicated in pathology; (v) treating a subject for a disease or condition for which CLL1+ cells are implicated in pathology; (vi) treating a subject for a disease or condition for which BCMA+ cells are implicated in pathology; (vii) treating a subject for a disease or condition for which CS1+ cells are implicated in pathology; (viii) treating a subject for a disease or condition for which CD123+ cells are implicated in pathology; treating a subject for a disease or condition for which Her2+ cells are implicated in pathology; or (ix) treating a subject for a disease or condition for which a particular target antigen (e.g., a tumor associated antigen) is implicated in pathology.

[0036] In some embodiments, the present disclosure provides a method of treating a subject in need thereof with a switch disclosed herein and a complimentary CAR expressed on a CAR-EC. In some embodiments, the present disclosure provides a method of treating a subject in need thereof with (i) a humanized CAR-EC switch comprising: a CAR-ID that interacts with a chimeric antigen receptor on the CAR-EC and a humanized targeting moiety that binds CD19 on a target cell and (ii) a complementary CAR expressed on a CAR-EC. In some embodiments, the CAR-EC switch used in the method comprises a CAR-ID selected from a yeast transcription factor GCN4 peptide or derivative thereof, a GCN4 peptide that does not dimerize; a flag tag peptide; a non-naturally occurring peptide, a naturally occurring peptide, a synthetic peptide tag, an alpha helix-forming peptide, a K4 peptide, and an E4 peptide. In some embodiments, the GCN4 derivative does not dimerize. In some embodiments, the GCN4 derivative is selected from any one of the GCN4 derivatives disclosed herein. In some embodiments, the GCN4 peptide derivative comprises a sequence of Structure I: X1 NYHLENEVARLKX2X3 (SEQ ID NO: 269), wherein X1, X2, and X3 are optionally any amino acid or absent. In some embodiments, the GCN4 peptide derivative consists of a sequence of Structure I: X1 NYHLENEVARLKX2X3 (SEQ ID NO: 269), wherein X1, X2, and X3 are optionally any amino acid or absent. In some embodiments, X1 is K or absent. In some embodiments, X2 is selected from K, A, and G. In some embodiments, X3 is selected from L, A, and G. In some embodiments, the GCN4 peptide derivative comprises a sequence selected from any one of SEQ ID NOS: 26, 36, 139, 145, and 154-163. In some embodiments, the GCN4 peptide derivative comprises a sequence selected from any one of SEQ ID NOS: 26, 36, 139-163 and 245. In some embodiments, the GCN4 peptide derivative consists of a sequence selected from any one of SEQ ID NOS: 26, 36, 139, 145, and 154-163. In some embodiments, the GCN4 peptide derivative consists of a sequence selected from any one of SEQ ID NOS: 26, 36, 139-163 and 245.

[0037] In some embodiments, the CAR-ID is FITC.

[0038] In some embodiments, the present disclosure provides a method of treating a subject in need thereof with (i) a CAR-EC expressing a CAR comprising an anti-GCN4 extracellular region (e.g., an anti-GCN4 antibody or a GCN4-binding portion thereof, disclosed herein) and (ii) a CAR-EC switch comprising: a CAR-ID comprising a GCN4 derivative peptide that interacts with the anti-GCN4 CAR on the CAR-EC; and a targeting moiety. In some embodiments, the GCN4 derivative does not dimerize. In some embodiments, the GCN4 derivative is selected from any one of the GCN4 derivatives disclosed herein. In some embodiments, the GCN4 peptide derivative comprises a sequence of Structure I: X1 NYHLENEVARLKX2X3 (SEQ ID NO: 269), wherein X1, X2, and X3 are optionally any amino acid or absent. In some embodiments, the GCN4 peptide derivative consists of a sequence of Structure I: X1 NYHLENEVARLKX2X3 (SEQ ID NO: 269), wherein X1, X2, and X3 are optionally any amino acid or absent. In some embodiments, X1 is K or absent. In some embodiments, X2 is selected from K, A, and G. In some embodiments, X3 is selected from L, A, and G. In some embodiments, the GCN4 peptide derivative comprises a sequence selected from any one of SEQ ID NOS: 26, 36, 139, 145, and 154-163. In some embodiments, the GCN4 peptide derivative comprises or consists of a sequence selected from any one of SEQ ID NOS: 26, 36, 139-163 and 245.

[0039] In some embodiments, the GCN4 peptide derivative consists of a sequence selected from any one of SEQ ID NOS: 26, 36, 139, 145, and 154-163.

[0040] In some embodiments, the targeting moiety comprised of the CAR-EC switch used in the method of treating a subject in need thereof comprises a targeting moiety selected from the targeting moieties disclosed herein. In some particular embodiments, the targeting moiety is an anti-CD19 antibody, or an antigen binding portion thereof. In some embodiments, the targeting moiety comprises or consists of a humanized anti-CD19 antibody, or an antigen binding portion thereof (e.g., any one or more of the humanized anti-CD19 antibodies or antigen binding portions thereof disclosed herein). In some embodiments, the targeting moiety comprises or consists of a humanized FMC63 antibody, or an antigen binding portion of a humanized FMC63 antibody. In some embodiments, the targeting moiety comprises or consists of an anti-CD20 antibody, an anti-CD22 antibody, an anti-EGFR antibody, an anti-EGFRvIII antibody, an anti-Her2 antibody, an anti-CS1 antibody, an anti-BCMA antibody, an anti-CEA antibody, an anti-CLL1 antibody, an anti-CD123 antibody, or an anti-CD33 antibody. In some embodiments, the targeting moiety comprises or consists of a humanized anti-CD20 antibody, a humanized anti-CD22 antibody, a humanized anti-EGFR antibody, a humanized anti-EGFRvIII antibody, a humanized anti-Her2 antibody, a humanized anti-CS1 antibody, a humanized anti-BCMA antibody, a humanized anti-CEA antibody, a humanized anti-CLL1 antibody, a humanized anti-CD123 antibody, or a humanized anti-CD33 antibody.

[0041] In some embodiments, the targeting moiety comprised of the CAR-EC switch used in the method of treating a subject in need thereof comprises a targeting moiety that is an FMC63 antibody, or a CD19-binding portion thereof, which comprises (i) a light chain sequence selected from the group consisting of SEQ ID NOS: 16-25 or a light chain sequence selected from the group consisting SEQ ID NOS: 27-35; and (ii) a heavy chain sequence selected from the group consisting of SEQ ID NOS: 1-15.

[0042] In some embodiments, the method comprises treating a subject for a disease or condition for which CD19+ cells are implicated in pathology comprising administering an anti-CD19 CAR-EC switch and a CAR-EC expressing a complementary CAR. In some embodiments, the method comprises a. treating a subject for a disease or condition for which CD20+ cells are implicated in pathology; in some embodiments, the method comprises b. treating a subject for a disease or condition for which CD22+ cells are implicated in pathology; in some embodiments, the method comprises c. treating a subject for a disease or condition for which CD33+ cells are implicated in pathology; in some embodiments, the method comprises d. treating a subject for a disease or condition for which CEA+ cells are implicated in pathology; in some embodiments, the method comprises e. treating a subject for a disease or condition for which CLL1+ cells are implicated in pathology; in some embodiments, the method comprises f treating a subject for a disease or condition for which BCMA+ cells are implicated in pathology; in some embodiments, the method comprises g. treating a subject for a disease or condition for which CS1+ cells are implicated in pathology; in some embodiments, the method comprises h. treating a subject for a disease or condition for which CD123+ cells are implicated in pathology; in some embodiments, the method comprises treating a subject for a disease or condition for which Her2+ cells are implicated in pathology; or treating a subject for a disease or condition for which a particular target antigen (e.g., a tumor antigen) is implicated in pathology. In some embodiments, the method comprises a. treating a subject for a disease or condition selected from heterogeneous tumors and blood cell malignancies. In some embodiments, the method comprises treating a subject for disease or condition selected from acute lymphoblastic leukemia, acute myloid leukemia, and chronic lymphocytic leukemia. In some embodiments, the method comprises treating a subject for disease or condition selected from multiple myeloma, Hodgkins lymphoma, Non-hodgkins lymphoma (NHL), Diffuse large B cell lymphoma (DLBCL), Follicular lymphomas, Mantle cell lymphoma (MCL), Burkitt lymphoma, and Hairy cell leukemia (HCL). In some embodiments, the method comprises administering at least one switch disclosed herein and a complimentary CAR-EC.

[0043] In some embodiments, the present disclosure provides a pharmaceutical composition comprising a CAR-EC switch disclosed and one or more pharmaceutically acceptable salts, excipients and/or vehicles. In some embodiments, the pharmaceutical composition comprises carriers, excipients, diluents, antioxidants, preservatives, coloring, flavoring and diluting agents, emulsifying agents, suspending agents, solvents, fillers, bulking agents, buffers, delivery vehicles, tonicity agents, co-solvents, wetting agents, complexing agents, buffering agents, antimicrobials, and/or surfactants and one or more CAR-EC switch disclosed herein. In some embodiments, the pharmaceutical composition comprises at least two CAR-EC switches, wherein at least one of the switches is a switch disclosed herein, and one or more pharmaceutically acceptable salts, excipients or vehicles. In some embodiments, the pharmaceutical composition comprises two or more switches disclosed herein.

[0044] In some embodiments, the present disclosure provides a CAR-EC expressing a CAR selected from any one of the CAR disclosed herein. In some embodiments, the CAR comprises an extracellular domain, a transmembrane domain an intracellular signaling domain; wherein the extracellular domain comprises a humanized anti-GCN4 scFv comprising a sequence selected from SEQ ID NOS: 290-388, and 423. In some embodiments, the scFv comprises the amino acid sequence SEQ ID NO: 322. In some embodiments, the scFv comprises an amino acid sequence that is at least 50%, at least 60%, at least 70%, at least 80%, at least 85%, at least 90%, at least 95%, at least 96%, at least 97%, at least 98%, or at least 99% identical to SEQ ID NO: 322. In some embodiments, the CAR comprises a structure selected from structures A-H in FIG. 22A. In some embodiments, the CAR comprises a structure according to structure E in FIG. 22A. In some embodiments, the CAR comprises a sequence selected from SEQ ID NOS: 389-397, 401, 403, 405, 407, 409, 411, 413, and 415. In some embodiments, the CAR comprises the amino acid sequence SEQ ID NO: 411. In some embodiments, the CAR comprises an amino acid sequence that is at least 50%, at least 60%, at least 70%, at least 80%, at least 85%, at least 90%, at least 95%, at least 96%, at least 97%, at least 98%, or at least 99% identical to sequence SEQ ID NO: 411. In some embodiments, the CAR-EC is a T cell.

[0045] In some embodiments, the present disclosure provides a method of treating relapsed cancer, comprising administering to a subject: a first CAR-EC switch disclosed herein; a second CAR-EC switch comprising a CAR-ID and a targeting moiety; and a CAR-EC that binds the CAR-ID on the first CAR-EC switch and the CAR-ID on the second CAR-EC switch, wherein the first CAR-EC is administered before a relapse of the subject and the second CAR-EC switch is administered after the relapse of the subject. In some embodiments, the second CAR-EC switch comprises an anti-CD20 targeting moiety. In some embodiments, the targeting moiety of the first CAR-EC switch comprises a targeting antibody, or an antigen binding portion thereof, which comprises a light chain sequence selected from any one of SEQ ID NOS: 27-35 and a heavy chain sequence selected from any one of SEQ ID NOS: 2-15, 248, 250, 252, 254, 256, 258, 260, 262, 264, 266, and 268.

[0046] In some embodiments, the present disclosure provides a method of treating relapsed cancer, comprising administering to a subject: a first CAR-EC switch comprising a CAR-ID and a targeting moiety; a second CAR-EC switch selected from any one of the switches disclosed herein; and a CAR-EC that binds the CAR-ID on the first CAR-EC switch and the CAR-ID on the second CAR-EC switch, wherein the first CAR-EC is administered before a relapse of the subject and the second CAR-EC switch is administered after the relapse of the subject. In some embodiments, the targeting moiety of the second CAR-EC switch comprises a targeting antibody, or an antigen binding portion thereof, which comprises a light chain sequence selected from any one of SEQ ID NOS: 27-35 and a heavy chain sequence selected from any one of SEQ ID NOS: 2-15, 248, 250, 252, 254, 256, 258, 260, 262, 264, 266, and 268.

[0047] In some embodiments, the present disclosure provides a method of lysing a target cell, comprising contacting the target cell with a humanized CAR-EC switch disclosed herein and contacting the CAR-EC switch with a complementary CAR-EC. In some embodiments, the present disclosure provides a method of lysing a target cell, comprising contacting the target cell with a CAR-EC switch and contacting the CAR-EC switch with a complementary humanized CAR-EC disclosed herein.

[0048] In some embodiments, the present disclosure provides a method of killing a target cell, comprising contacting the target cell with a humanized CAR-EC switch disclosed herein and contacting the CAR-EC switch with a complementary CAR-EC

[0049] In some embodiments, the present disclosure provides a method of killing a target cell, comprising contacting the target cell with a CAR-EC switch and contacting the CAR-EC switch with a complementary humanized CAR-EC disclosed herein.

[0050] In some embodiments, the present disclosure provides a method of activating a CAR-EC comprising contacting a CAR expressed on the CAR-EC with a CAR-EC switch selected from any one of the CAR-EC switches set forth in claims 21-68, wherein the CAR-EC is activated when the targeting moiety on the CAR-EC switch is bound to both its target on the target cell and to the extracellular domain of the CAR on the CAR-EC, wherein the CAR binds to the CAR-ID on the CAR-EC switch.

[0051] In some embodiments, the present disclosure provides a method of controlling the magnitude of a T cell response by modulating the dosing regimen of a CAR-EC switch administration to a subject. In some embodiments, the first dosing regimen comprises administering a CAR-EC switch at a first high dose on a first short dosing schedule and a second dosing regimen comprises administering a CAR-EC switch at a second low dose on a second dosing schedule that is longer than the first dosing schedule. In some embodiments, the first dosing schedule comprises administering the CAR-EC switch at least once every other day. In some embodiments, the first dosing schedule comprises administering the CAR-EC switch every other day. In some embodiments, the first dosing schedule comprises administering the first high dose of the CAR-EC switch every other day for a total of four administrations. In some embodiments, the first dosing schedule comprises administering the first high dose of the CAR-EC switch every other day or about every other day for a total of four administrations or a total of about four administrations. In some embodiments, the second dosing schedule comprises administering the second low dose every other day for a total of twelve administrations. In some embodiments, the second dosing schedule comprises administering the second low dose every other day or about every other day for a total of twelve administrations or about twelfth administrations. In some embodiments, the high dose is at least 5 fold, 10 fold, or at least 15 fold that of a low dose. In some embodiments, the first dosing regimen results in increased T cell expansion in a subject administered the high dose as compared to the T cell expansion in a subject administered the low dose. In some embodiments, the CAR-EC switch is a humanized CAR-EC switch disclosed herein. In some embodiments, the CAR-EC switch comprises a targeting antibody, or an antigen binding portion thereof, which comprises a light chain sequence selected from any one of SEQ ID NOS: 27-35 and a heavy chain sequence selected from any one of SEQ ID NOS: 2-15, 248, 250, 252, 254, 256, 258, 260, 262, 264, 266, and 268. In some embodiments, the T cell comprises a CAR described herein. In some embodiments, the T cell comprises a humanized CAR comprising an extracellular domain, a transmembrane domain an intracellular signaling domain; wherein the extracellular domain comprises a humanized anti-GCN4 scFv comprising a sequence selected from SEQ ID NOS: 290-388, and 423. In some embodiments, the scFv comprises the amino acid sequence SEQ ID NO: 322. In some embodiments, the scFv comprises an amino acid sequence that is at least 50%, at least 60%, at least 70%, at least 80%, at least 85%, at least 90%, at least 95%, at least 96%, at least 97%, at least 98%, or at least 99% identical to SEQ ID NO: 322. In some embodiments, the CAR comprises a structure selected from structures A-H in FIG. 22A. In some embodiments, the CAR comprises a structure according to structure E in FIG. 22A. In some embodiments, the CAR comprises a sequence selected from SEQ ID NOS: 389-397, 401, 403, 405, 407, 409, 411, 413, and 415. In some embodiments, the CAR comprises the amino acid sequence SEQ ID NO: 411. In some embodiments, the CAR comprises an amino acid sequence that is at least 50%, at least 60%, at least 70%, at least 80%, at least 85%, at least 90%, at least 95%, at least 96%, at least 97%, at least 98%, or at least 99% identical to sequence SEQ ID NO: 411. In some embodiments, the extracellular domain comprises a hinge domain comprising a sequence selected from SEQ ID NOS: 93-103 and 165-168.

### BRIEF DESCRIPTION OF THE DRAWINGS

[0052] FIG. 1: shows an alignment of the Heavy Chain sequences of various exemplary huFMC Fabs that may be used as CAR-EC switches of the present disclosure.

[0053] FIG. 2: shows an alignment of the Light Chain sequences of various exemplary huFMC Fabs that may be used as CAR-EC switches of the present disclosure.

[0054] FIG. 3: shows an SDS PAGE gel, depicting the huFMC CAR-EC switches expressed in the LCNT switch format. The left side of the gel is not reduced. The right side of the gel is reduced with DTT.

[0055] FIG. 4: shows SDS PAGE gel, depicting the huFMC CAR-EC switches expressed in the LCNT switch format. The left side of the gel is not reduced. The right side of the gel is reduced with DTT.

[0056] FIG. 5: shows flow cytometry-based binding assay of huFMC63 Fabs on CD19+ RS4;11 cells. EC₅₀ listed in nM (nanomolar).

[0057] FIG. 6: shows flow cytometry-based binding assay of huFMC63 Fabs on CD19+ RS4;11 cells. EC₅₀ listed in nM (nanomolar).

[0058] FIG. 7: shows flow cytometry-based binding assay of huFMC63 Fabs on CD19+ RS4;11 cells. FMC63 WT signifies chimeric FMC63 Fab (annotated as LC, HC in EC₅₀ table). EC₅₀ listed in nM (nanomolar).

[0059] FIG. 8: shows flow cytometry-based binding assay of huFMC63 Fabs on CD19+ RS4;11 cells. FMC63 wt signifies chimeric FMC63 Fab (annotated as LC, HC in EC₅₀ table). EC₅₀ listed in nM (nanomolar).

[0060] FIG. 9: shows flow cytometry-based binding assay of huFMC63 Fabs on CD19+ RS4;11 cells. FMC63 wt signifies chimeric FMC63 Fab (annotated as LC, HC in EC₅₀ table). EC₅₀ listed in nM (nanomolar)

[0061] FIG. 10: shows cytotoxicity of huFMC63-based switches with switchable CAR-T (sCAR-T) cells against CD19+ RS4;11 cells. EC₅₀ values for this experiment are listed in Table 8 along with 3 repeats of this experiment. 80% CAR+ indicates 80% of the T cell population used in this assay was positive for the switchable CAR. FMC63 LCNT signifies chimeric FMC63 Fab with GCN4 peptide on the N terminus of the light chain.

[0062] FIG. 11: shows cytotoxicity of huFMC63-based switches with switchable CAR-T cells against CD19-K562 cells. No EC₅₀ values were calculated from cytotoxicity on K562 due to the low levels of cytotoxicity found. 80% CAR+ indicates 80% of the T cell population used in this assay was positive for the switchable CAR. FMC63 LCNT signifies chimeric FMC63 Fab with GCN4 peptide on the N terminus of the light chain.

[0063] FIG. 12: shows polynomial regression used to predict immunogenicity of an antibody by in silico analysis. Twenty-two licensed antibodies that make up the polynomial regression used for predicting T-cell dependent HAHA responses.

[0064] FIG. 13: shows EpiMatrix Protein Immunogenicity Scale with Overall Immunogenic Potential hFMC2b-LCNT (labeled as LC1)/hFMCH4c (labeled as HC) sequences.

[0065] FIG. 14: shows a general overview of switchable chimeric receptor-T cell therapy disclosed herein. Lymphocytes are isolated from a subject and an expression vector encoding a chimeric receptor is subsequently introduced to the lymphocytes to produce chimeric receptor effector cells. Chimeric receptor effector cells are administered to the subject, along with a switch.

[0066] FIG. 15: exemplifies switch optimization for switchable CAR-T cells by varying the length of the immunological synapse from long (left) to intermediate (middle) to short (right), activity increasing from left to right.

[0067] FIG. 16: exemplifies switch optimization for switchable CAR-T cells by varying the length of the immunological from intermediate (left) to short (middle) to very short (right), switch activity optimal with a short synapse, relative to switch activity produced with the intermediate synapse or very short synapse.

[0068] FIG. 17 exemplifies CAR hinge and CAR switch optimization. FIG. 17A shows an example of switchable CAR-T cell and formation of a monovalent immunological synapse from a monovalent switch and a monovalent CAR. FIG. 17B shows an example of switchable CAR-T cell and formation of a bivalent immunological synapse from a bivalent switch and a monovalent CAR. FIG. 17C shows an example of switchable CAR-T cell and formation of a bivalent immunological synapse from a monovalent switch and a bivalent CAR. FIG. 17D shows an example of switchable CAR-T cell and formation of a bivalent immunological synapse from a bivalent switch and a bivalent CAR. Relative activity of switchable CAR-T cells is shown by (+) signs below each of FIGS. 17A-D.

[0069] FIG. 18 illustrates an example of a dock and lock switchable chimeric receptor-T cell platform in which the DDD-module is on the chimeric receptor extracellular domain and the AD-module is on the switch.

[0070] FIG. 19 shows residue numbering on GCN4 peptide derivatives for reference with Example 6. The original peptide used for targeting is shown at the bottom colored by results of alanine scanning. Red indicates residue that is intolerant to alanine mutation (complete loss of binding to anti-GCN4 scFv 52SR4), orange indicates residue that is somewhat tolerant to alanine mutation (some loss of binding to anti-GCN4 scFv 52SR4, but still some level of binding), and green indicates residue that is completely tolerant to alanine mutation (no loss of binding to anti-GCN4 scFv 52SR4 compared with the original peptide sequence). Potential modifications to the sequence are listed on top. Residues 1-4 are part of the native GCN4 sequence, included in the previously reported development of the 52SR4 antibody. Yellow indicates a new residue not explored before as a target of the CAR-EC. Blue indicates preferred residue addition or modification based on both the extended residues and the alanine scanning. This schematic was used to design modified peptides A-O.

[0071] FIG. 20 shows the binding of CAR-EC switches comprising GCN4 peptide derivative CAR-IDs to switchable CAR-T cells (52SR4 and humanized variants sCAR).

[0072] FIG. 21 shows LDH cytotoxicity assays using FMC63-based CAR-EC switches comprising GCN4 peptide derivative CAR-IDs with switchable CAR-T cells (52SR4 sCAR) against CD19+ RS4;11 cells.

[0073] FIG. 22 shows humanization of anti-CD19 switch. FIG. 22A shows EC₅₀ of cytotoxicity with humanized switch variants against RS4;11 cells. N=4, significance measured by one-way ANOVA. FIG. 22B shows correlation between cytokine production, binding affinity, and EC₅₀ of cytotoxicity. FIG. 22C shows a NALM-6 xenograft model. Tumor burden was established by injecting NSG mice iv with 0.5×10⁶NALM-6 cells. Six days later, 20×10⁶ sCAR-T cells were injected, followed by 8 doses of humanized switch administered every other day over the period of 14 days (experiment 1: 0.5 mg/kg, solid lines; experiment 2: 0.05 mg/kg, dashed lines). N=3.

[0074] FIG. 22D shows thermal stability (N=4), analytical size exclusion chromatograph (SEC), and purification yields (N=8-12) of murine switch and humanized switch candidate L2b/H4c.

[0075] FIG. 23 shows a sequence alignment of the heavy and light chains of the humanized candidate L2b/H4c with the humanized framework regions and the murine FMC63 sequence.

[0076] FIG. 24 shows sCAR-T cell constructs and sequences. FIG. 24A shows schematics of sCAR-T cell constructs. FIG. 24B shows an exemplary sCAR-T sequence. FIG. 24C shows the SEQ ID NOS of various components of sCAR-T cell constructs.

[0077] FIG. 25 shows comparison of different costimulatory domains. FIG. 25A shows expression of the sCAR on primary human T cells by flow cytometry binding to a labeled GCN4 peptide. FIG. 25B shows EC₅₀ of cytotoxicity with anti-CD19 switch against RS4;11. Constructs sorted to enrich CAR+ clones and expanded to 8-12 days prior to cytotoxicity. N=5-6. FIG. 25C and FIG. 25D show Table and scatter plot of EC₅₀'s by construct hinge, transmembrane domain and costimulatory domain (N=6 across three independent donors). Significance in FIG. 25D is by paired T test. FIG. 25E shows a NALM-6 xenograft model. Tumor burden was established by injecting NSG mice iv with 0.5×10⁶NALM-6 cells. Six days later, 20×10⁶ sCAR-T or CART19 cells were injected, followed by 8 doses of switch (0.5 mg/kg) administered every other day.

[0078] FIG. 25F shows cytokines measured from mouse serum, 24 h after the first dose of switch in the NALM-6 model, significance by one way ANOVA. FIG. 25G shows expansion of sCAR-T cells 24 h after the last dose of switch in the NALM-6 model. Significance by one way ANOVA.

[0079] FIG. 25E, FIG. 25F, and FIG. 25G show cumulative data from three independent donors.

[0080] FIG. 26 shows in vivo efficacy of the CD28-hinge based sCAR-T cells from the NALM-6 model shown in FIG. 25D.

[0081] FIG. 27 shows selection of the best humanized switchable CAR construct. FIG. 27A shows an alignment of murine, germline, and humanized light and heavy chain sequences. Blue square point mutations V12S, L109D, E6Q, and A87 and CDR 1, 2, and 3 for light and heavy chains. FIG. 27B shows long term (>50 days) antitumor efficacy across multiple in vivo assays comparing humanized CAR variants. Red lines indicate humanized variants with at least 1 mouse with <10⁴ radiance at day 50. FIG. 27C upper box shows a schematic of light and heavy chain humanized variants. FIG. 27 lower portion shows humanized CAR group assignments corresponding to A-G plotted on FIGS. 27D and 27E. FIG. 27D shows in vitro dose-response cytotoxicity comparison across 41BB, CD28 and 3rd Gen 28BB co-stimulatory domains of murine and humanized CAR variants in CD19+ RS411 cell line. FIG. 27E shows in vivo anti-tumor efficacy comparison across 41BB, CD28 and 3rd Gen 28BB co-stimulatory domains of murine and humanized CAR variants in CD19+ Nalm6 xenograft models.

[0082] FIG. 28 shows alignment of murine (52SR4) and potential humanized sequences of heavy chain variable regions.

[0083] FIG. 29 shows alignment of murine (52SR4) and potential humanized sequences of light chain variable regions.

[0084] FIG. 30 shows a model of the crystal structure of an anti-GCN4 scFv variant (C11L34; Green: Heavy chain; Light blue: Light chain) complexed with GCN4 peptide (Dark Blue). Humanized residues are labeled in red.

[0085] FIG. 31 shows experimental results of humanized murine switchable CARs. Upper three left graphs show comparisons of CAR-T cell expansion across 41BB, CD28 and 3rd Generation 28BB co-stimulatory domains of murine and humanized CAR variants from in vivo efficacy xenograft models. On day 21, after Nalm6 injection, blood was collected and stained for CAR-T and analyzed by flow cytometry. Upper right graph shows normalized CAR-T cell counts of anti-tumor efficacy in vivo assays. Values were normalized to the L5H4 construct. Significance is by one-way Anova. Lower panel shows ranked humanized CAR constructs. Tumor burden, frequency and time of relapses, and T cell expansion values from in vivo models were ranked for each construct and averaged accordingly.

[0086] FIG. 32 shows in vivo cytokine production comparison. Mouse serum from efficacy xenograft models was collected 24 h after CAR-T and switch injection and cytokines quantified. Graphs show normalized values to L5H4 CAR-T group. Significance by one-way Anova.

[0087] FIG. 33 shows in vitro characterization of humanized CAR constructs. Upper panels: T cell expansion comparison across 41BB, CD28, and 3rd Gen 28BB humanized constructs. Lower panels: Transduction efficiency of 41BB, CD28, and 3rd Gen 28BB humanized CAR constructs over time.

[0088] FIG. 34 shows in vitro cytotoxicity of humanized CAR constructs over time. Left, middle, and right columns represent 41BB, CD28, and 3rd Gen 28BB CAR constructs respectively. Rows show dose-response cytotoxicity 19, 26, and 33 days after T cell transduction from top to bottom, respectively.

[0089] FIG. 35 shows in vitro cytotoxicity of humanized CAR constructs over time. Top row shows EC₅₀ values from cytotoxicity assays over time after T-cell transduction. Bottom row shows maximum killing of each construct over time after T-cell transduction.

[0090] FIG. 36 shows a NALM-6 xenograft model using a combination of the humanized switch and humanized CAR. Tumor burden was established by injecting NSG mice iv with 0.5×10⁶ NALM-6 cells. Six days later, 5×10⁶ sCAR-T or CART19 cells were injected, followed by 8 doses of humanized L2b/H4c switch administered every other day over the period of 14 days (0.5 mg/kg). N=6.

[0091] FIG. 37 shows a heterogeneous Raji CD19+/CD19− xenograft model. Tumor burden was established by injecting NSG mice with a mixture of Raji CD19+ and Raji CD19− cells (0.5×10⁶ total cells per mouse). 3 days later, 10×10⁶ sCAR-T or CART19 cells were injected, followed by 8 doses of anti-CD19 switch (0.5 mg/kg) over the period of 14 days. Eight doses of anti-CD20 switch (0.5 mg/kg) were administered once the average ROI exceeded 10⁵, indicating relapse of CD19− Raji cells. FIG. 37A shows tumor progression in mice injected with 1:1 ratio of CD19+: CD19− Raji cells, and treated with anti-CD19 and anti-CD20 switches simultaneously. Additional 8 doses of anti-CD20 switch were administered every other day between days 64 and 78. N=3. FIG. 37B shows tumor progression in mice injected with 4:1 ratio of CD19+:CD19-Raji cells. Mice were treated with 8 doses of anti-CD20 switch every other day on days 10-24, and additional 8 doses of anti-CD20 switch were administered between days 64 and 78. N=3.

[0092] FIG. 37C shows tumor progression in mice injected with 49:1 ratio of CD19+:CD19− Raji cells. Mice were treated with 8 doses of anti-CD20 switch every other day on days 18-32. N=3-6.

[0093] FIG. 38 shows a schematic depicting various constructs of murine sCARs constructed with different hinge lengths by utilizing the IgG4 short hinge, the mouse CD8 hinge, or mouse CD28 hinge.

[0094] FIG. 39 shows a syngeneic system. FIG. 39A shows control of tumor growth by sCAR-T cells in immunocompetent mice: CAR efficacy comparison between IgG4 (SV-319-092) and mCD8 (SV-319-089) hinge. FIGS. 39B and 39C show cell kinetics in the peripheral blood (absolute numbers) through phenotyping by flow cytometry in 2 independent experiments: FIG. 39B shows CD45+vs 4-1BB (SV-319-091)/28BB (SV-319-092) sCAR-T cells; and FIG. 39C shows B cells vs 28BB SV-319-092 sCAR-T cells. Tumor burden was established at day 0 by injecting C3H immunocompetent mice s.c. with 1×10⁶ 38 C13 tumor cells. Seven days later, mice are preconditioned with 100 mg/kg cyclophosphamide (CTX) i.p. (tumors are measurable and mice are randomized). Twenty-four hours later, 10×10⁶ sCAR-T cells are injected i.v., followed by 8 doses of switch administered i.v. every other day over the period of 14 days at 1 mg/kg, starting 4 h after sCAR-T cell injection. After a 2-week resting period, switch dosing was resumed for another 8 doses at 1 mg/kg every other day at day 36 and at day 64. Immune cells from peripheral blood were analyzed at day 15, 25, 35, 53, 63, 81 and 99 post-tumor implantation (N=5/6). FIGS. 39D and 39E show the impact of different switch dosing regimens on sCAR-T cell expansion (FIG. 39D) and phenotype (FIG. 39E). Naïve C3H immunocompetent mice were preconditioned with 100 mg/kg cyclophosphamide (CTX) i.p. (day −1) and were injected i.v. 24 hours later with 10×10⁶ SV-319-092 sCAR-T cells followed by 4, 8 or 12 doses of switch administered i.v. every other day over the period of 6, 14 or 22 days at 0.2, 1 or 5 mg/kg, starting 4 h after sCAR-T cell injection. sCAR-T cell expansion and phenotype were monitored over time in the peripheral blood at day 7, 25, 35 and 53 after sCAR-T injection by flow cytometry (N=5).

### DETAILED DESCRIPTION

### Definitions

[0095] Unless defined otherwise, all technical and scientific terms used herein have the same meaning as commonly understood by one of ordinary skill in the art to which this invention belongs. Although any methods and materials similar or equivalent to those described herein can be used in the practice or testing of the present invention, some potential and preferred methods and materials are now described. All publications mentioned herein are incorporated herein by reference to disclose and describe the methods and/or materials in connection with which the publications are cited. It is understood that the present disclosure supersedes any disclosure of an incorporated publication to the extent there is a contradiction (and in particular, any term definitions specifically set forth in the present application supersede any conflicting definition of that term disclosed in a publication incorporated by reference).

[0096] As will be apparent to those of skill in the art upon reading this disclosure, each of the individual embodiments described and illustrated herein has discrete components and features which may be readily separated from or combined with the features of any of the other several embodiments without departing from the scope or spirit of the present invention. Any recited method can be carried out in the order of events recited or in any other order which is logically possible.

[0097] It must be noted that as used herein and in the appended claims, the singular forms “a”, “an”, and “the” include plural referents unless the context clearly dictates otherwise. Thus, for example, reference to “a cell” includes a plurality of such cells and reference to “the peptide” includes reference to one or more peptides and equivalents thereof, e.g., polypeptides, known to those skilled in the art, and so forth.

[0098] The publications discussed herein are provided solely for their disclosure prior to the filing date of the present application. Nothing herein is to be construed as an admission that the present invention is not entitled to antedate such publication by virtue of prior invention. Further, the dates of publication provided may be different from the actual publication dates which may need to be independently confirmed.

[0099] As used herein, the terms “antibody fragment” and “immunoglobulin fragment” are used interchangeably to refer to any form of an antibody other than the full-length form. Antibody fragments herein include antibodies that are smaller components that exist within full-length antibodies, and antibodies that have been engineered. Antibody fragments include, but are not limited to, Fv, Fc, Fab, and (Fab′)2, single chain Fv (scFv), diabodies, triabodies, tetrabodies, bifunctional hybrid antibodies, a CDR1, a CDR2, a CDR3, combinations of CDRs, variable regions, framework regions, constant regions, heavy chains, light chains, alternative scaffold non-antibody molecules, and bispecific antibodies. Unless specifically noted otherwise, statements and claims that use the term “antibody” or “antibodies” may specifically include “antibody fragment” and “antibody fragments.” The term “antigen binding fragment,” used in reference to an antibody or an immunoglobulin means any antibody fragment that possesses binding affinity for a target (such as, e.g., a target protein, peptide, small molecule, tumor antigen). Antibody “fragment” and antibody “portion” are also used interchangeably herein, as are the terms “antigen binding fragment” and “antigen binding portion.”

[0100] The term “anti-CD19 antibody” refers to an antibody that binds CD19. CD19, also known as “Cluster of Differentiation 19”, is well-known in the art to be a protein that is expressed on the surface of B-cells.

[0101] The terms “chimeric receptor”, “chimeric antigen receptor”, and “CAR” are used interchangeably herein to refer to a receptor expressed on a suitable effector cell (e.g., a T cell), said receptor capable of binding to a CAR-ID, as described herein.

[0102] Reference to “CAR-EC” means “chimeric antigen receptor effector cell”, and CAR-EC refers, generally, to an effector cell that expresses a chimeric receptor (such as, e.g., a chimeric antigen receptor). In some embodiments, CAR-EC is not limited, however, to merely effector cells expressing chimeric antigen receptors (i.e., expressing antibodies or antigen binding fragments of antibodies), but the term may also encompass effector cells expressing other chimeric receptors that are capable of binding to a target (e.g., a “chimeric antigen receptor-interacting domain” (CAR-ID) comprised on a CAR-EC switch, as disclosed herein. Suitable effector cells for use in the present invention (e.g., as CAR-ECs) include effector cells selected from a naive T cell, a memory stem cell T cell, a central memory T cell, an effector memory T cell, a helper T cell, a CD4+ T cell, a CD8+ T cell, a CD8/CD4+ T cell, an αβ T cell, a γδ T cell, a cytotoxic T cell, a natural killer T cell, a natural killer cell, a macrophage.

[0103] Reference to a CAR and its “complementary” CAR-EC switch (e.g., a complementary humanized anti-CD19 CAR-EC switch disclosed herein), or similarly reference to a CAR-EC switch and its “complementary CAR” means a pair of a CAR-EC switch comprising a particular CAR-ID, and a CAR that comprises an extracellular domain that comprises binding affinity for that particular CAR-ID. So, as a non-limiting example, one of average skill in the art will appreciate that a CAR-EC switch comprising a GCN4 peptide CAR-ID (e.g., with the amino acid sequence of SEQ ID NO: 26) will be bound by a CAR comprising an anti-GCN4 extracellular domain that has binding affinity for that GCN4 peptide (e.g., an anti-GCN4 antibody or antigen binding portion thereof such as a scFv). Thus, such an anti-GCN4 CAR and a CAR-EC comprising the GCN4 CAR-ID are “complementary” because the CAR binds the CAR-EC switch. Similarly, switches comprising a FITC, FLAG, K4, and E4 CAR-ID are complementary to CARs comprising binding affinity for FITC, FLAG, K4 (e.g., an E4 peptide), E4 (e.g., a K4 peptide), respectively.

[0104] The term “endotoxin-free” or “substantially endotoxin-free” relates generally to compositions, solvents, and/or vessels that contain at most trace amounts (e.g., amounts having no clinically adverse physiological effects to a subject) of endotoxin, and preferably undetectable amounts of endotoxin. Endotoxins are toxins associated with certain microorganisms, such as bacteria, typically gram-negative bacteria, although endotoxins may be found in gram-positive bacteria, such as Listeria monocytogenes. The most prevalent endotoxins are lipopolysaccharides (LPS) or lipo-oligo-saccharides (LOS) found in the outer membrane of various Gram-negative bacteria, and which represent a central pathogenic feature in the ability of these bacteria to cause disease. Small amounts of endotoxin in humans may produce fever, a lowering of the blood pressure, and activation of inflammation and coagulation, among other adverse physiological effects.

[0105] Therefore, in pharmaceutical production, it is often desirable to remove most or all traces of endotoxin from drug products and/or drug containers, because even small amounts may cause adverse effects in humans. A depyrogenation oven may be used for this purpose, as temperatures in excess of 300° C. are typically required to break down most endotoxins. For instance, based on primary packaging material such as syringes or vials, the combination of a glass temperature of 250° C. and a holding time of 30 minutes is often sufficient to achieve a 3 log reduction in endotoxin levels. Other methods of removing endotoxins are contemplated, including, for example, chromatography and filtration methods, as described herein and known in the art. Also included are methods of producing CAR-EC switches in and isolating them from eukaryotic cells such as mammalian cells to reduce, if not eliminate, the risk of endotoxins being present in a composition of the invention. Preferred are methods of producing CAR-EC switches in and isolating them from serum free cells.

[0106] Endotoxins can be detected using routine techniques known in the art. For example, the Limulus Ameobocyte Lysate assay, which utilizes blood from the horseshoe crab, is a very sensitive assay for detecting presence of endotoxin. In this test, very low levels of LPS can cause detectable coagulation of the limulus lysate due a powerful enzymatic cascade that amplifies this reaction. Endotoxins can also be quantitated by enzyme-linked immunosorbent assay (ELISA). To be substantially endotoxin-free, endotoxin levels may be less than about 0.001, 0.005, 0.01, 0.02, 0.03, 0.04, 0.05, 0.06, 0.08, 0.09, 0.1, 0.5, 1.0, 1.5, 2, 2.5, 3, 4, 5, 6, 7, 8, 9, or 10 EU/mg of protein. Typically, 1 ng lipopolysaccharide (LPS) corresponds to about 1-10 EU.

[0107] Reference to “FMC63” means the anti-CD19 mouse monoclonal antibody clone originally described in 1991 by H. Zola and coworkers (1), which has been used in the most well studied conventional CAR-T cell from Carl June and coworkers (2-4). These references (1, 2, 3, and 4, listed below in the “References” section) are incorporated herein by reference in their entirety. The terms “FMC63”, “FMC”, “huFMC”, and “hFMC” are used interchangeably herein.

[0108] Reference to “FMC63 VH” means the variable portion of the heavy chain of the FMC63 antibody.

[0109] Reference to “FMC63 VL” means the variable portion of the light chain of the FMC63 antibody.

[0110] “Humanized” forms of non-human (e.g. murine) antibodies are chimeric immunoglobulins, immunoglobulin chains or fragments thereof (such as, e.g., Fv, Fab, (Fab′)2, single chain Fv (scFv) or other antigen-binding subsequences of antibodies) in which the non-human (e.g., murine) framework regions of the variable domain are changed into human framework region sequences. In some embodiments, a humanized antibody is humanized to reduce immunogenicity to humans. In some embodiments, a humanized antibody retains the specificity and/or affinity of the parental non-human antibody. In some embodiments, a humanized antibody retains substantially all of the specificity and/or affinity of the parental non-human antibody.

[0111] As used herein, the term “or humanized variants thereof” refers to any sequence variant of a reference sequence, which variant comprises at least one amino acid change (i.e., substitution, deletion, or addition) that results in variant sequence having increased identity to a human germline sequence as compared to the reference sequence. In some embodiments, “or humanized variants thereof” refers to sequences that comprise at least one amino acid change that makes the sequence “more humanized”, i.e., causes the sequence to have a greater identity with a human reference sequence. For example, a humanized variant of an FMC63 VH or FMC63 VL sequence is a sequence that comprises one or more (e.g., 2, 3, 4, 5, 6, 7, 8, 9, or more) mutations as compared to the murine parent FMC63VH and VL sequences provided as SEQ ID NOS: 15 and 25, respectively. In embodiments, the humanized variant of a reference antibody sequence or portion thereof (e.g., an FMC63 VH or FMC63 VL sequence) maintains binding affinity for the target of the reference antibody. For example, but not to be limited in any way, a humanized FMC63 sequence may maintain binding to CD19.

[0112] The term “humanized anti-CD19 switch” refers, generally, to any CAR-EC switch that comprises a targeting moiety that (i) is capable of binding CD19; and (ii) is a humanized variant of a reference CD19 antibody. In some embodiments, the humanized anti-CD19 switch comprises a humanized form of the reference antibody FMC63. In some embodiments, the humanized anti-CD19 switch comprises a humanized portion of the reference antibody FMC63 (e.g., (i) a humanized FMC63 VH, (ii) a humanized FMC63 VL, or (iii) a humanized FMC63 VH and a humanized FMC63 VL.

[0113] The term “humanized switch” refers, generally, to any CAR-EC switch that comprises a targeting moiety that (i) is capable of binding a target; and (ii) is a humanized variant of a reference antibody or an antigen binding portion thereof. In some embodiments, the humanized switch comprises a humanized form of the reference antibody. In some embodiments, the humanized switch comprises a humanized portion of the reference antibody (e.g., (i) a humanized VH, (ii) a humanized VL, or (iii) a humanized VH and a humanized VL.

[0114] By a subject polypeptide sequence having an amino acid sequence at least, for example, 95% “identical” to a query amino acid sequence disclosed herein, it is intended that the amino acid sequence of the subject polypeptide is identical to the query sequence except that the subject polypeptide sequence may include up to five amino acid alterations per each 100 amino acids of the query amino acid sequence. In other words, to obtain a subject polypeptide having an amino acid sequence at least 95% identical to a query amino acid sequence, up to 5% of the amino acid residues in the subject sequence may be inserted, deleted, or substituted with another amino acid. These alterations as compared to the reference sequence may occur at the amino- or carboxy-terminal positions of the reference amino acid sequence or anywhere between those terminal positions, interspersed either individually among residues in the reference sequence or in one or more contiguous groups within the reference sequence. The identity of two or more sequences (e.g., amino acid sequences) can be compared to one another, or to published sequences, using the Basic Local Alignment Search Tool or “BLAST” algorithm; described in Johnson M, et al., (2008) NCBI BLAST: a better web interface. Nucleic Acids Res. 36:W5-W9 (incorporated herein by reference in its entirety). Similarly, identity can be determined between two nucleotide sequences in the same manner. Thus, to obtain a subject nucleotide sequence (e.g., RNA or DNA sequence, such as a cDNA sequence) that is at least 95% identical to a query nucleotide sequence, up to 5% of the nucleotide residues in the subject sequence may be inserted, deleted, or substituted with another nucleotide.

[0115] The terms “switch” and “CAR-EC Switch” are used interchangeably herein.

[0116] Reference to “VH” means the variable portion of a heavy chain of an antibody or an antibody fragment.

[0117] Reference to “VL” means the variable portion of the light chain of an antibody or an antibody fragment.

[0118] Reference to an antibody, or antigen binding portion thereof that is said to “specifically bind” or “preferentially bind” (used interchangeably herein) to a polypeptide or other target (e.g., to CD19) is a term well understood in the art, and methods to determine such specific or preferential binding are also well known in the art. A molecule is said to exhibit “specific binding” or “preferential binding” if it reacts or associates more frequently, more rapidly, with greater duration and/or with greater affinity with a particular cell or substance than it does with alternative cells or substances. An antibody “specifically binds” or “preferentially binds” to a target if it binds with greater affinity, avidity, more readily, and/or with greater duration than it binds to other substances. For example, an antibody that specifically or preferentially binds to CD19 is an antibody that binds CD19 with greater affinity, avidity, more readily, and/or with greater duration than it binds to other non-CD19 polypeptides. It is also understood by reading this definition that, for example, an antibody (or an antigen binding portion thereof) that specifically or preferentially binds to a first target (e.g., CD19) may or may not specifically or preferentially bind to a second target. As such, “specific binding” or “preferential binding” does not necessarily require (although it can include) exclusive binding. Generally, but not necessarily, reference to binding means preferential binding.

[0119] “Substantially” or “essentially” means of ample or considerable amount, quantity, size; nearly totally or completely; for instance, 95% or greater of some given quantity.

[0120] “Substantially similar” sequences are sequences comprising at least about 90% identity in sequence (e.g., amino acid or nucleotide sequence) with one another, or at least about 95%, 96%, 97%, 98%, 99% or more than about 99% identity with one another.

### Overview:

[0121] Disclosed herein are compositions and methods for selectively activating and deactivating chimeric receptor effector cells (e.g., chimeric antigen receptor T cells), which may provide for a safer and more versatile immunotherapy than conventional CAR-T cell designs currently being tested in clinical trials by providing control over the therapy.

[0122] Disclosed herein are switchable chimeric receptor effector cells (CAR-ECs) and chimeric receptor effector cell switches (referred to as “switches,” herein), including humanized switches and humanized CAR-ECs.

[0123] Disclosed herein are platforms comprising one or more switch disclosed herein (e.g., a humanized switch) and one or more CAR-ECs (e.g., a CAR-EC disclosed here, such as a humanized CAR-EC), wherein a CAR expressed on a CAR-EC included in the platform is complementary to a switch included in the platform. In some embodiments, the platforms comprise a plurality of switches, each of which bind different targets (i.e., each switch has a different targeting moiety) and each of which are complementary to a single CAR-EC included in the platform. In some embodiments, the platforms comprise a plurality of switches, each of which bind different targets (i.e., each switch has a different targeting moiety) and each of which are complementary to at least one of a plurality of CAR-ECs included in the platform.

[0124] The switches disclosed herein comprise a first region that is bound by an effector cell chimeric receptor and a second region that binds a cell surface molecule on target cell. The first region is referred herein as a chimeric antigen receptor interacting domain (CAR-ID). The second region is referred to herein as a “targeting moiety.” The targeting moiety may be a targeting polypeptide. The targeting polypeptide may be a targeting antibody or antibody fragment that binds an antigen on the target cell. The targeting antibody or antigen binding portion thereof may be humanized. The humanized switches disclosed herein may comprise a targeting moiety that is humanized. In some embodiments, the cell surface molecule is CD19. In some embodiments, the cell surface molecule is Her2, CLL1, CD33, CD123, EGFR, EGFRvIII, CD20, CD22, CS1, BCMA, CEA or a fragment thereof. In some embodiments, the targeting moiety binds CD19. In some embodiments, the targeting moiety binds Her2, CLL1, CD33, CD123, EGFR, EGFRvIII, CD20, CD22, CS1, BCMA, CEA or a fragment thereof. In some particular embodiments, the targeting moiety specifically binds CD19. In some particular embodiments, the targeting moiety specifically binds Her2, CLL1, CD33, CD123, EGFR, EGFRvIII, CD20, CD22, CS1, BCMA, CEA or a fragment thereof. In some particular embodiments, the targeting moiety is an anti-CD19 antibody, or an antigen binding portion thereof. In some embodiments, the targeting moiety comprises or consists of a humanized anti-CD19 antibody, or an antigen binding portion thereof (e.g., any one or more of the humanized anti-CD19 antibodies or antigen binding portions thereof disclosed herein). In some embodiments, the targeting moiety comprises or consists of a humanized FMC63 antibody, or an antigen binding portion thereof.

[0125] Chimeric receptor binding of the switch may stimulate an immune response from the effector cell that is cytotoxic to the bound target cell. In some embodiments, the effector cell is a T cell. The switch may act as an “on-switch,” triggering (or increasing) effector cell activation. The switch may act as an “off switch,” blocking (or decreasing) effector cell activation. Effector cell activity may be “turned off” by reducing or ceasing administration of the switch. The humanized switches disclosed herein may be used with the effector cells disclosed herein, as well as existing CAR T-cells, for the treatment of a disease or condition, such as cancer, wherein the target cell is a malignant cell. Such treatment may be referred to herein as switchable immunotherapy, for which an exemplary schematic overview is depicted in FIG. 14.

[0126] Methods, kits and compositions are provided for producing CAR-EC cells, CAR-EC platforms and humanized CAR-EC switches, which are used to bring an effector cell together with a target (e.g., a target cell such as a tumor) in a subject. These methods, kits and compositions find therapeutic use in a number of diseases and conditions. For example, methods, kits, and compositions comprising a CAR-EC switch with an anti-CD19 targeting moiety may be used to treat any disease in which CD19+ cells are implicated in pathology. For example, but not to be limited in any way, in some embodiments, heterogeneous tumors and blood cell malignancies (e.g., acute lymphoblastic leukemia and chronic lymphocytic leukemia) may be effectively treated with a CAR-EC cell, CAR-EC switch, and/or a CAR-EC platform disclosed herein. In some non-limiting embodiments, CAR-EC cells, CAR-EC platforms and/or humanized CAR-EC switches may be used to treat, e.g., a disease selected from multiple myeloma, acute myloid leukemia, Hodgkins lymphoma, Non-hodgkins lymphoma (NHL), Diffuse large B cell lymphoma (DLBCL), Follicular lymphomas, Mantle cell lymphoma (MCL), Burkitt lymphoma, and Hairy cell leukemia (HCL).

[0127] Similarly, methods, kits, and compositions comprising a CAR-EC switch with an anti-Her2 targeting moiety may be used to treat any disease in which Her2+ cells are implicated in pathology; methods, kits, and compositions comprising a CAR-EC switch with an anti-CLL1 targeting moiety may be used to treat any disease in which CLL1+ cells are implicated in pathology, and similarly, methods, kits, and compositions comprising a CAR-EC switch with any targeting moiety that has specificity for a particular target antigen (e.g., a tumor antigen) may be used to treat any disease in which that target antigen (e.g., tumor antigen) is implicated in pathology.

[0128] In some embodiments, the length, valency and/or orientation of the CAR-EC switch linkage as well as the CAR-EC switch cell targeting moiety is optimized. Heterogeneous tumors may be more effectively treated with multiple switches that target more than one tumor antigens. Advantages and features of the invention will become apparent to those persons skilled in the art upon reading the details of the compositions and methods as more fully described below.

[0129] While preferred embodiments of the present invention have been shown and described herein, it will be obvious to those skilled in the art that such embodiments are provided by way of example only. Numerous variations, changes, and substitutions will now occur to those skilled in the art without departing from the invention. It should be understood that various alternatives to the embodiments of the invention described herein may be employed in practicing the invention. It is intended that the following claims define the scope of the invention and that methods and structures within the scope of these claims and their equivalents be covered thereby.

### I. CAR-EC Switches

[0130] Disclosed herein are chimeric receptor-effector cell switches comprising: (i) a first region (CAR-ID) that is capable of being bound by a chimeric receptor on an effector cell (e.g., a chimeric antigen receptor) and (ii) a second region (targeting moiety) that binds a cell surface molecule on a target cell.

[0131] In some embodiments, the present disclosure provides a chimeric receptor-effector cell switch comprising: (i) a first region (CAR-ID) that comprises a yeast transcription factor GCN4 peptide derivative (e.g., a GCN4 peptide derivative selected from SEQ ID NOS: 139, 154-163) and (ii) a second region (targeting moiety) that binds a cell surface molecule on a target cell; wherein the CAR-ID is capable of being bound by a chimeric receptor on an effector cell (e.g., a chimeric antigen receptor).

[0132] In some embodiments, the present disclosure provides a humanized chimeric receptor-effector cell switch comprising: (i) a first region (CAR-ID) that is capable of being bound by a chimeric receptor on an effector cell (e.g., a chimeric antigen receptor) and (ii) a second region (targeting moiety) that binds a cell surface molecule on a target cell; wherein the targeting moiety is humanized.

[0133] In some particular embodiments, the present disclosure provides a humanized chimeric receptor-effector cell switch comprising: (i) a first region (CAR-ID) that is capable of being bound by a chimeric receptor on an effector cell (e.g., a chimeric antigen receptor) and (ii) a second region (targeting moiety) that binds CD19 on a target cell; wherein the targeting moiety is humanized.

[0134] In some particular embodiments, the present disclosure provides a humanized chimeric receptor-effector cell switch comprising: (i) a first region (CAR-ID) that comprises a yeast transcription factor GCN4 peptide derivative (e.g., a GCN4 peptide derivative selected from SEQ ID NOS: 139, 154-163) and (ii) a second region (targeting moiety) that binds CD19 on a target cell; wherein the targeting moiety is humanized.

[0135] In some embodiments, the first and second regions are linked by a linker.

[0136] In some embodiments, the first region and the second region are fused together. As used herein, the term “fused” may refer to adjoining a terminus of the CAR-ID with a terminus of a polypeptide targeting moiety (e.g., a humanized anti-CD19 antibody or an antigen binding fragment thereof). In some embodiments, the first region and the second region are fused together via a linker.

[0137] In some embodiments, the first region is grafted into the second region. As used herein, the term “grafted” may refer to inserting a CAR-ID within a targeting polypeptide (e.g., between two amino acids of the targeting polypeptide). In some embodiments, the second region is grafted into the first region. In some embodiments, the first region is grafted into the second region such that the first and the second regions are linked by at least one linker. In some embodiments, the second region is grafted into the first region such that the first and the second regions are linked by at least one linker.

[0138] In some embodiments, the first region is attached to the second region. In some embodiments, the first region is attached to the second region via a linker. The linker may be attached to a CAR-ID. The linker may be attached to a targeting moiety. The linker may attach a CAR-ID to a targeting moiety. The one or more linkers may attach the one or more CAR-IDs to the one or more targeting moieties. The one or more linkers may attach the one or more CAR-IDs to the one or more targeting moieties in a site-specific manner. Attachment in a site-specific manner may comprise attaching the one or more CAR-IDs to a predetermined site on the one or more targeting moieties. Alternatively, or additionally, attachment in a site-specific manner may comprise attaching the one or more CAR-IDs to an unnatural amino acid in the one or more targeting moieties. The one or more linkers may attach the one or more CAR-IDs to the one or more targeting moieties in a site-independent manner. Attachment in a site-independent manner may comprise attaching the one or more CAR-IDs to a random site on the one or more targeting moieties. The CAR-ID may be attached to 1, 2, 3, 4, 5 or more targeting moieties in a site-specific manner. The CAR-ID may be attached to 1, 2, 3, 4, 5 or more targeting moieties in a site-independent manner. Alternatively, the targeting moiety may be attached to 1, 2, 3, 4, 5 or more CAR-IDs in a site-specific manner. Attachment in a site-specific manner may comprise attaching the one or more targeting moieties to a predetermined site on the one or more CAR-IDs. The targeting moiety may be attached to 1, 2, 3, 4, 5 or more CAR-IDs in a site-independent manner. Attachment in a site-independent manner may comprise attaching the one or more targeting moieties to a random site on the one or more CAR-IDs.

[0139] The CAR-EC switch may have any switch sequence disclosed herein. For example, it may comprise a light chain and a heavy chain, wherein the light chain comprises or consists of any switch light chain sequence disclosed herein and the heavy chain comprises or consists of any switch heavy chain sequence disclosed herein. Such heavy and/or light chain sequences may be humanized. In some embodiments, the CAR-EC switch is humanized and comprises a light chain sequence selected from SEQ ID NOS: 17-24 and a heavy chain sequence selected from SEQ ID NOS: 2-14, wherein one or both of the heavy and light chains comprise a CAR-ID disclosed herein (e.g., a GCN4 CAR-ID). In some embodiments, the CAR-EC switch is humanized and comprises a light chain sequence that is at least 80%, 85%, 80%, 95%, 96%, 97%, 98%, or at least 99% identical to a sequence selected from SEQ ID NOS: 17-24 and a heavy chain sequence that is at least 80%, 85%, 80%, 95%, 96%, 97%, 98%, or at least 99% identical to a sequence selected from SEQ ID NOS: 2-14, wherein one or both of the heavy and light chains comprise a CAR-ID disclosed herein (e.g., a GCN4 CAR-ID). In particular embodiments, the light chain sequence comprises a humanized sequence selected from SEQ ID NOS: 27-34 (which comprise an N-terminal GCN4 CAR-ID) and a heavy chain sequence selected from SEQ ID NOS: 2-14. In particular embodiments, the light chain sequence comprises a humanized sequence that is at least 80%, 85%, 80%, 95%, 96%, 97%, 98%, or at least 99% identical to a sequence selected from SEQ ID NOS: 27-34 (which comprise an N-terminal GCN4 CAR-ID) and a heavy chain sequence that is at least 80%, 85%, 80%, 95%, 96%, 97%, 98%, or at least 99% identical to a sequence selected from SEQ ID NOS: 2-14. In particular embodiments, the switch is a switch described in Table 6 or Table 8, which presents heavy chain/light chain combinations comprised in several of the switches disclosed herein. In some embodiments, the switch is identical to a switch described in Table 6 or Table 8, except that the CAR-ID comprised in the switch is modified to have a sequence of Structure I. In some embodiments, the sequence of Structure I is selected from any one of SEQ ID NOS: 26, 36, 139, and 154-163. In certain particular embodiments, the CAR-EC switch comprises the L2b-LCNT (SEQ ID NO: 30) light chain and the H4c (SEQ ID NO: 7) heavy chain.

[0140] In certain particular embodiments, the CAR-EC switch comprises (i) a sequence that is at least 80%, 85%, 80%, 95%, 96%, 97%, 98%, or at least 99% identical to the L2b-LCNT (SEQ ID NO: 30) light chain and (ii) a sequence that is at least 80%, 85%, 80%, 95%, 96%, 97%, 98%, or at least 99% identical to the H4c (SEQ ID NO: 7) heavy chain.

[0141] In certain particular embodiments, the CAR-EC switch comprises the L2b-LCNT (SEQ ID NO: 30) light chain and the H4b (SEQ ID NO: 6) heavy chain. In certain particular embodiments, the CAR-EC switch comprises (i) a sequence that is at least 80%, 85%, 80%, 95%, 96%, 97%, 98%, or at least 99% identical to the L2b-LCNT (SEQ ID NO: 30) light chain and (ii) a sequence that is at least 80%, 85%, 80%, 95%, 96%, 97%, 98%, or at least 99% identical to the H4b (SEQ ID NO: 6) heavy chain.

[0142] In certain particular embodiments, the CAR-EC switch comprises (i) a sequence that is at least 80%, 85%, 80%, 95%, 96%, 97%, 98%, or at least 99% identical to the L2c-LCNT (SEQ ID NO: 34) light chain and (ii) a sequence that is at least 80%, 85%, 80%, 95%, 96%, 97%, 98%, or at least 99% identical to the H4b (SEQ ID NO:6) heavy chain.

[0143] In certain particular embodiments, the CAR-EC switch comprises (i) a sequence that is at least 80%, 85%, 80%, 95%, 96%, 97%, 98%, or at least 99% identical to the L2c-LCNT (SEQ ID NO: 34) light chain and (i) a sequence that is at least 80%, 85%, 80%, 95%, 96%, 97%, 98%, or at least 99% identical to the H4c (SEQ ID NO:7) heavy chain.

[0144] In some embodiments, the present disclosure provides a CAR-EC switch that comprises or consists of a sequence that is identical to any one switch disclosed in any one of the following applications: PCT/US2014/060713, PCT/US2014/060684, PCT/US2016/024524, PCT/US2016/027997, and PCT/US2016/027990 (each of which are incorporated herein by reference in its entirety), except that the switch comprises a humanized antibody as its targeting moiety or the switch comprises an antigen-binding portion of a humanized antibody as its targeting moiety. In some particular embodiments, the present disclosure provides a CAR-EC switch that comprises or consists of a sequence that is identical to any one switch disclosed in any one of the following applications: PCT/US2014/060713, PCT/US2014/060684, PCT/US2016/024524, PCT/US2016/027997, and PCT/US2016/027990 (each of which are incorporated herein by reference in its entirety), except that the switch comprises a humanized FMC63 antibody disclosed herein as its targeting moiety or the switch comprises an antigen-binding portion of a humanized FMC63 antibody as its targeting moiety. Thus, in some embodiments, the present disclosure provides a switch comprising a humanized FMC63 antibody or an antigen binding portion thereof linked or fused to any one of the CAR-IDs disclosed in any one of the applications: PCT/US2014/060713, PCT/US2014/060684, PCT/US2016/024524, PCT/US2016/027997, and PCT/US2016/027990. It will be apparent to one skilled in the art that PCT/US2014/060684 and PCT/US2016/027997 refer to CAR-IDs as “CAR-BPs”, and any such CAR-BP is suitable as a CAR-ID for use in the present invention. Similarly, PCT/US2016/024524 refers to CAR-IDs as “chimeric receptor binding partners” and any such chimeric receptor binding partner is suitable as a CAR-ID for use in the present invention. PCT/US2016/027990 refers to CAR-IDs as CAR-IDs, and any such CAR-ID disclosed in PCT/US2016/027990 is suitable for use as a CAR-ID in the present invention. Further, the application provides a chimeric receptor that is able to bind to the CAR-ID on the switch and an effector cell expressing such a chimeric receptor. Thus, accordingly, any of the chimeric receptors (e.g., CARs) disclosed in any one of the applications: PCT/US2014/060713, PCT/US2014/060684, PCT/US2016/024524, PCT/US2016/027997, and PCT/US2016/027990 may be used according to the present invention in combination with a CAR-EC switch disclosed herein. In some embodiments, the present disclosure provides a method of treating a patient in need of such treatment with a CAR-EC switch disclosed herein and a CAR disclosed in any one of the applications: PCT/US2014/060713, PCT/US2014/060684, PCT/US2016/024524, PCT/US2016/027997, and PCT/US2016/027990.

### First Region of the CAR-EC Switch: CAR-Interaction Domains.

[0145] The CAR-Interaction Domains (CAR-ID) comprised on the humanized CAR-EC switches disclosed herein may be anything that may be fused, conjugated, or otherwise attached to a targeting moiety described herein (e.g., a humanized anti-CD19 antibody or an antigen binding portion thereof), such that the CAR-ID is capable of being bound by a chimeric receptor (e.g., a CAR) on an effector cell (e.g., a T cell). For example, in non-limiting embodiments, the CAR-ID may be a chimeric receptor binding protein (e.g., a CAR-binding protein). In non-limiting embodiments, the CAR-ID may be a chimeric receptor binding peptide (e.g., a CAR-binding peptide). In non-limiting embodiments, the CAR-ID may be a chimeric receptor binding small molecule (e.g., a CAR-binding small molecule). In some embodiments, binding of the CAR to the CAR-ID on a switch activates the CAR. In some embodiments, binding of the CAR to the CAR-ID on a switch activates the CAR only if the targeting moiety on the switch is also concurrently bound to its target. In some embodiments, binding of a CAR to the CAR-ID on a switch activates the CAR only if a humanized anti-CD19 antibody on the switch (e.g., any one of the humanized anti-CD19 antibodies disclosed herein) is also concurrently bound to CD19 on a target cell. In such embodiments, the CAR may be expressed on an effector cell. In such embodiments, the binding of the CAR expressed on an effector cell to the CAR-ID on the switch while a humanized anti-CD19 antibody on the switch (e.g., any one of the humanized anti-CD19 antibodies disclosed herein) is also concurrently bound to CD19 on a target cell results in target cell cytotoxicity.

### Chimeric Receptor Binding Proteins

[0146] In some embodiments, the CAR-ID comprises or consists of a chimeric receptor binding protein that is bound by a chimeric receptor. The chimeric receptor binding protein may have high proteolytic stability and low immunogenicity in humans relative to a protein in general. The chimeric receptor binding protein may comprise a foreign protein or portion thereof. The chimeric receptor binding protein may not comprise a foreign protein or portion thereof. The chimeric receptor binding protein may be selected from a hormone, a cytokine, a chemokine, a growth factor, a cell adhesion molecule, a signaling peptide, a receptor, a cell surface peptide and fragments thereof. The chimeric receptor binding protein may be a ligand or a fragment thereof. The ligand may be a hormonal ligand. The chimeric receptor binding protein may have a length of more than about 100 amino acids, more than about 200 amino acids, more than about 300 amino acids, more than about 400 amino acids, more than about 500 amino acids, more than about 600 amino acids, more than about 700 amino acids, more than about 800 amino acids, more than about 900 amino acids, or more than about 1000 amino acids. The chimeric receptor binding protein may have a length of about 100 amino acids, about 200 amino acids, about 300 amino acids, about 400 amino acids, about 500 amino acids, about 600 amino acids, about 700 amino acids, about 800 amino acids, about 900 amino acids, or about 1000 amino acids. The chimeric receptor binding protein may be an antigen.

[0147] The chimeric receptor binding protein may comprise an antibody or antibody fragment. The chimeric receptor binding protein may not comprise an antibody or antibody fragment. The chimeric receptor binding protein may comprise at least about 100, at least about 200, at least about 300, at least about 400, or at least about 500 amino acids of an antibody or antibody fragment. The antibody or antibody fragment may comprise a variable domain or portion thereof. The antibody or antibody fragment may comprise a constant domain or portion thereof.

[0148] The chimeric receptor binding protein may comprise a non-naturally occurring protein. The chimeric receptor binding protein may comprise a synthetic protein. The chimeric receptor binding protein may comprise a non-animal protein (e.g., a protein not expressed in an animal). The chimeric receptor binding protein may comprise a non-mammalian protein. The chimeric receptor binding protein may comprise a non-human protein. The chimeric receptor binding protein may comprise a protein derived from any live being from any of the six kingdoms (Animalia, Plantae, Fungi, Protista, Archaea/Archaeabacteria, and Bacteria/Eubacteria), viruses, and prions.

[0149] The chimeric receptor binding protein may comprise a protease cleavage site. Any protease cleavage site known in the art may be comprised in the chimeric receptor binding protein. The protease cleavage site may be recognized by, e.g., thrombin, factor Xa, TEV protease, Human Rhinovirus 3C protease (HRV3C), ubiquitin-like-specific protease 1 (Ulp1), a matrix metalloprotease (MMP) or enterokinase. The MMP may be MMP8. The MMP may be MMP9.

[0150] The chimeric receptor binding protein may be based on or derived from a naturally occurring protein. The peptide may be based on or derived from a human protein. The chimeric receptor binding protein may be based on or derived from a protein expressed in animal selected from a chimpanzee, a monkey, a rat, a mouse, a bird, a fish, a pig, a horse, a cow, a goat, a chicken, a rabbit and a guinea pig. The chimeric receptor binding protein may be based on or derived from a mammalian protein. The chimeric receptor binding protein may be based on or derived from a non-mammalian protein. The chimeric receptor binding protein may be based on or derived from a protein expressed in a plant. The chimeric receptor binding protein may be based on or derived from a prokaryotic protein. The chimeric receptor binding protein may be based on or derived from a eukaryotic protein. The chimeric receptor binding protein may be based on or derived from a protein expressed by a yeast.

[0151] Thus, in various non-limiting embodiments, the chimeric receptor binding protein may comprise an enzyme. The enzyme may be a nuclease. The nuclease may be a ribonuclease. The ribonuclease may be prokaryotic. The chimeric receptor binding protein may comprise a substrate. The chimeric receptor binding protein may comprise barstar. The chimeric receptor binding protein may comprise barnase. In some embodiments, the chimeric receptor binding protein may be a protein selected from a fibrous protein, an adhesion molecule protein, and a membrane protein. The chimeric receptor binding protein may comprise a Streptococcus pyogenes pilin protein. The chimeric receptor binding protein may comprise a Streptococcus pyogenes fibronectin binding protein (SpyCatcher). The chimeric receptor binding protein may comprise a protein or a portion of a protein selected from a synaptobrevin, a SNAP25 and a syntaxin, and portions thereof (e.g., alpha helix). The chimeric receptor binding protein may comprise an RNAseI. The chimeric receptor binding protein may comprise a HuS adapter protein.

### Chimeric Receptor Binding Peptide

[0152] In some embodiments, the CAR-ID comprises or consists of a peptide, e.g., a CAR binding peptide. The CAR-ID may be a peptide that is capable of being bound by a chimeric antigen receptor (CAR). The CAR-ID may be, e.g., any “peptidic antigen,” “peptide neo-epitope (PNE),” or “chimeric antigen binding peptidic antigen (CAR-BP)” disclosed in PCT/US2014/060684 or PCT/US2016/027997, each of which are incorporated herein by reference in their entirety.

[0153] The CAR-ID may have high proteolytic stability and low immunogenicity in humans relative to peptides in general. The CAR-ID may be selected from a hormone, a cytokine, a chemokine, a growth factor, a cell adhesion molecule, a signaling peptide, a receptor, a cell surface peptide and fragments thereof. The CAR-ID may be a peptoid. The CAR-ID may be a peptide nucleic acid (PNA). The CAR-ID may be a ligand or a fragment thereof. The ligand may be a hormonal ligand. The ligand may be a peptide ligand. The CAR-ID may be a cyclic peptide. The CAR-ID may be a linear peptide.

[0154] The CAR-ID may have a length of between about 2 and about 10, about 10 and about 20, about 20 and about 30, about 30 and about 40, about 40 and about 50, about 50 and about 60, about 60 and about 70, about 70 and about 80, and about 80 and about 90 amino acids. The CAR-ID may be an antigen. The CAR-ID may be an epitope. The CAR-ID may be a nonlinear epitope. The CAR-ID may further comprise a second peptide.

[0155] The CAR-ID may not comprise an antibody or antibody fragment. The CAR-ID may comprise less than 10 amino acids of an antibody or antibody fragment. The CAR-ID may comprise less than 12 amino acids of an antibody or antibody fragment. The CAR-ID may comprise less than 15 amino acids of an antibody or antibody fragment. The CAR-ID may comprise less than 20 amino acids of an antibody or antibody fragment. The CAR-ID may comprise less than 22 amino acids of an antibody or antibody fragment. The CAR-ID may comprise less than 30 amino acids of an antibody or antibody fragment. The CAR-ID may not comprise a paratope of an antibody or antibody fragment.

[0156] The CAR-ID may comprise a non-naturally occurring peptide. The CAR-ID may comprise a synthetic peptide. The CAR-ID may comprise a non-animal peptide (e.g., a peptide not expressed in an animal). The CAR-ID may comprise a non-mammalian peptide. The CAR-ID may comprise a non-human peptide. The peptide may be derived from any live being from any of the six kingdoms (Animalia, Plantae, Fungi, Protista, Archaea/Archaeabacteria, and Bacteria/Eubacteria), viruses, and prions. Thus, the peptide may be derived from, consist of, or comprise a human, mammal, non-mammal, plant, a yeast, a bacteria, a reptile, a bird an insect, a eukaryote, or a prokaryote. The term “a peptide derived from” a particular biological organism (e.g., mammal, yeast, etc.) is meant to describe a peptide that comprises a sequence that is substantially similar to a sequence of a native peptide known to exist in such a biological organism, except that the sequence has been modified, i.e., to include one or more addition, deletion, insertion, or substitution of an amino acid. In some embodiments, the sequence is modified by humanization, e.g., to reduce immunogenicity of the peptide to humans. In some embodiments, the peptide derived from a biological organism (e.g., a eukaryote, prokaryote, mammal, human, yeast, etc.) comprises a non-natural sequence that is at least about 80% identical to a peptide that is native to that biological organism, or at least about 85%, 90%, 95%, 96%, 97%, 98%, 99%, or greater than 99% identical to a peptide that is native to that biological organism.

[0157] The CAR-ID may comprise a myc-tag. The CAR-ID may comprise His-tag. The CAR-ID may comprise an HA-tag. The CAR-ID may comprise peridinin chlorophyll protein complex. The CAR-ID may comprise green fluorescent protein (GFP). The CAR-ID may comprise red fluorescent protein (RFP). The CAR-ID may comprise phycoerythrin (PE). The CAR-ID may comprise streptavidin. The CAR-ID may comprise avidin. The CAR-ID may comprise horseradish peroxidase (HRP). The CAR-ID may comprise alkaline phosphatase. The CAR-ID may comprise glucose oxidase. The CAR-ID may comprise glutathione-S-transferase (GST). The CAR-ID may comprise maltose binding protein. The CAR-ID, by non-limiting example, may be a c-myc tag, polyhistidine tag, V5, VSVG, softag 1, softag 3, express tag, S tag, palmitoylation, nitrosylation, SUMO tag, thioredoxin, poly(NANP), poly-Arg, calmodulin binding protein, PurF fragment, ketosteroid isomerase, PaP3.30, TAF12 histone fold domain, FKBP-tag, SNAP tag, Halo-tag, peptides from RNAse I. The CAR-ID may comprise a protease cleavage site. The protease cleavage site may be recognized by thrombin, factor Xa, TEV protease or enterokinase.

[0158] The CAR-ID may be a small linear hydrophilic peptide. The small linear hydrophilic peptide may comprise a linker. The small linear hydrophilic peptide may be a hydrophilic target peptide (HTP). The small linear hydrophilic peptide may comprise the sequence GGGGSDYKDDDDK (SEQ ID NO: 38). The small linear hydrophilic peptide may comprise the sequence GGGGSDYKDDDDKP (SEQ ID NO: 39). The small linear hydrophilic peptide may consist essentially of the sequence GGGGSDYKDDDDK (SEQ ID NO:38). The small linear hydrophilic peptide may consist essentially of the sequence GGGGSDYKDDDDKP (SEQ ID NO: 39). The small linear hydrophilic peptide may be at least about 50% identical to SEQ ID NOs: 38 or 39. The small linear hydrophilic peptide may be at least about 60% identical to SEQ ID NOS: 38 or 39. The small linear hydrophilic peptide may be at least about 70% identical to SEQ ID NOS: 38 or 39. The small linear hydrophilic peptide may be at least about 80% identical to SEQ ID NOS: 38 or 39. The small linear hydrophilic peptide may be at least about 85% identical to SEQ ID NOS: 38 or 39. The small linear hydrophilic peptide may be at least about 90% identical to SEQ ID NOS: 38 or 39. The small linear hydrophilic peptide may have reduced non-specific binding relative to other peptides known in the art. The small linear hydrophilic peptide may have reduced non-specific binding and reduced fusion protein instability relative to other peptides disclosed herein. The CAR-ID may comprise a FLAG® tag (DYKDDDDK SEQ ID NO: 40) or a derivative or a homolog thereof.

[0159] The CAR-ID may be based on or derived from a naturally occurring peptide. The peptide may be based on or derived from a human peptide. The CAR-ID may be a non-endogenous peptide or a non-native peptide, as opposed to an endogenous peptide or native peptide. An endogenous peptide may be something that is naturally or normally present in the human body (e.g., biotin, Fc of monoclonal antibody) or that the human body typically encounters. Thus, a non-endogenous peptide would be something foreign or not naturally present in the human body. For example, switches disclosed herein may employ GCN4 peptides as CAR-IDs, which are not normally encountered in vivo. In some embodiments, such non-natural peptides maintain orthogonality of the sCAR-switch interaction. The CAR-ID may be a non-immunogenic peptide (e.g., a peptide known to cause no immune response or a negligible immune response in the human body).

[0160] The CAR-ID may be based on or derived from a peptide expressed in animal selected from a chimpanzee, a monkey, a rat, a mouse, a bird, a fish, a pig, a horse, a cow, a goat, a chicken, a rabbit and a guinea pig. The CAR-ID may be based on or derived from a mammalian peptide. The CAR-ID may be based on or derived from a non-mammalian peptide. The CAR-ID may be based on or derived from a peptide expressed in a plant. The CAR-ID may be based on or derived from a peptide expressed in a bacterium. The CAR-ID may be based on or derived from a prokaryotic peptide. The CAR-ID may be based on or derived from a eukaryotic peptide. The CAR-ID may be based on or derived from a peptide expressed by a yeast.

[0161] The CAR-ID may comprise a yeast transcription factor GCN4 peptide or a derivative or a homolog thereof. The yeast transcription factor GCN4 peptide may comprise a GCN4(7P14P) peptide sequence (defined in Berger et al. FEBS Letters 450 (1999) 149-153, incorporated herein by reference in its entirety). The yeast transcription factor GCN4 peptide may comprise the sequence RMKQLEPKVEELLPKNYHLENEVARLKKLVGER (SEQ ID NO: 36). The yeast transcription factor GCN4 peptide may comprise the sequence NYHLENEVARLKKL (SEQ ID NO: 26). The yeast transcription factor GCN4 peptide may consist of the sequence RMKQLEPKVEELLPKNYHLENEVARLKKLVGER (SEQ ID NO: 36). The yeast transcription factor GCN4 peptide may consist of the sequence NYHLENEVARLKKL (SEQ ID NO: 26). The yeast transcription factor GCN4 peptide may comprise a portion of SEQ ID NO: 36. The portion of SEQ ID NO: 36 may be at least 4 amino acids long. The portion of SEQ ID NO: 36 may be about 4, about 5, about 6, about 7, about 8, about 9, about 10, about 11, about 12 or about 13 amino acids long. The yeast transcription factor GCN4 peptide may comprise a portion of SEQ ID NO: 36 that is 4 amino acids long, or a portion of SEQ ID NO: 36 that is 5, 6, 7, 8, 9, 10, 11, 12, or 13 amino acids long. The yeast transcription factor GCN4 peptide may comprise the sequence NYHLENEVARLKK (SEQ ID NO: 245). The yeast transcription factor GCN4 peptide may comprise the sequence NYHLENEVARLK (SEQ ID NO: 145). The yeast transcription factor GCN4 peptide may be at least about 50% identical to one or both of SEQ ID NOs: 26 or 36. The yeast transcription factor GCN4 peptide may be at least about 60% identical to one or both of SEQ ID NOs: 26 or 36. The yeast transcription factor GCN4 peptide may be at least about 70% identical to one or both of SEQ ID NOs: 26 or 36. The yeast transcription factor GCN4 peptide may be at least about 80% identical to one or both of SEQ ID NOs: 26 or 36. The yeast transcription factor GCN4 peptide may be at least about 85% identical to one or both of SEQ ID NOs: 26 or 36. The yeast transcription factor GCN4 peptide may be at least about 90% identical to one or both of SEQ ID NOs: 26 or 36. The CAR-EC switch may comprise a yeast GCN4 peptide and one or more linkers. The CAR-EC switch may comprise SEQ ID NO. 37. The yeast transcription factor GCN4 peptide may comprise or consist of a minimal binding epitope for an anti-GCN4 antibody. The yeast transcription factor GCN4 peptide may comprise or consist of a binding epitope (e.g., a minimal binding epitope) for the anti-GCN4 antibody scFv 52SR4 (described in described in Zahnd, C., et al., (2004), The Journal of Biological Chemistry 279, 18870-18877 (incorporated herein by reference in its entirety)), or an antibody comprising 1, 2, 3, 4, 5, or 6 of the CDR sequences comprised therein (CDR1 VL: RSSTGAVTTSNYAS; CDR2 VL: GTNNRAP; CDR3 VL: ALWYSNHWV; CDR1 VH: DYGVN; CDR2 VH: VIWGDGITDYNSALKS; CDR3 VH: GLFDY). The CAR-ID may comprise a sequence of Structure I: X1 NYHLENEVARLKX2X3 (SEQ ID NO: 269), wherein X₁, X₂, and X₃ are optionally any amino acid or absent. In some embodiments, X₁ is K or absent. In some embodiments, X2 is selected from K, A, and G. In some embodiments, X3 is selected from L, A, and G. In some embodiments, the CAR-ID comprises or consists of a sequence selected from any one of SEQ ID NOS: 139, 154-163. KNYHLENEVARLKKL (SEQ ID NO: 154); KNYHLENEVARLKAL (SEQ ID NO: 155); KNYHLENEVARLKGL (SEQ ID NO: 156); KNYHLENEVARLKAA (SEQ ID NO: 157); KNYHLENEVARLKGG (SEQ ID NO: 158); NYHLENEVARLKKL (SEQ ID NO: 159); NYHLENEVARLKAL (SEQ ID NO: 160); NYHLENEVARLKGL (SEQ ID NO:161); NYHLENEVARLKAA (SEQ ID NO: 162); NYHLENEVARLKGG (SEQ ID NO: 163); and LLPKNYHLENEVARLKKL (SEQ ID NO: 139).

[0162] In some embodiments, by way of non-limiting example, the CAR-ID may comprise an isopeptag (TDKDMTITFTNKKDAE; SEQ ID NO: 41). The CAR-ID may comprise a SpyTag (AHIVMVDAYKPTK; SEQ ID NO: 42). The CAR-ID may comprise a SNARE. The CAR-ID may comprise a Hu-tag. The chimeric receptor binding partner may comprise a first alpha helix peptide that binds to a second alpha helix peptide such that the first alpha helix and the second alpha helix may form a coiled coil structure when bound. The CAR-ID may comprise the E4 peptide (EVAALEKEVAALEKEVAALEKEVAALEK; SEQ ID NO: 44). The CAR-ID may comprise the K4 peptide (KVAALKEKVAALKEKVAALKEKVAALKE; SEQ ID NO: 43).

[0163] The CAR-ID may comprise a modified E4 peptide. The CAR-ID may comprise a modified K4 peptide. The CAR-ID may consist of a peptide having the sequence of SEQ ID NO: 44. The CAR-ID may consist of a peptide having the sequence of SEQ ID NO: 43. The CAR-ID may comprise a peptide having a sequence that has at least 85%, at least 90%, at least 95% or greater identity to SEQ ID NO: 43). The CAR-ID may comprise a peptide having a sequence that has at least 85%, at least 90%, at least 95% or greater identity to SEQ ID NO: 44. The CAR-ID may comprise a peptide having a sequence that has at least 85%, at least 90%, at least 95% or greater identity to any one of the following K4 or E4 peptides (SEQ ID NOS: 45-58):

SEQ ID NO: 45

EVSALEKEVSALEKEVSALEKEVSALEK

SEQ ID NO: 46

KVSALKEKVSALKEKVSALKEKVSALKE

SEQ ID NO: 47

EIAALEKEIAALEKEIAALEK

SEQ ID NO: 48

EIAALEKEIAALEKEIAALEKEIAALEK

SEQ ID NO: 49

KIAALKEKIAALKEKIAALKE

SEQ ID NO: 50

KIAALKEKIAALKEKIAALKEKIAALKE

SEQ ID NO: 51

EISALEKEISALEKEISALEK

SEQ ID NO: 52

EISALEKEISALEKEISALEKEISALEK

SEQ ID NO: 53

KISALKEKISALKEKISALKE

SEQ ID NO: 54

KISALKEKISALKEKISALKEKISALKE

SEQ ID NO: 55

EVAALEKEVAALEKEVAALEK

SEQ ID NO: 56

KVAALKEKVAALKEKVAALKE

SEQ ID NO: 57

EVSALEKEVSALEKEVSALEK

SEQ ID NO: 58

KVSALKEKVSALKEKVSALKE

[0164] The CAR-ID may comprise a peptide having a sequence of any one of SEQ ID NOS: 45-58. A switch comprising a targeting moiety described herein and a CAR-ID comprising a peptide having a sequence of any one of SEQ ID NOS: 45, 47, 48, 51, 52, 55, and 57 may be paired with a CAR having a sequence of SEQ ID NO: 65 for use according to the present invention (e.g., such a switch may be used in combination with an effector cell expressing such a CAR to effect a treatment described herein). A switch comprising a targeting moiety described herein and a CAR-ID comprising a peptide having a sequence of any one of SEQ ID NOS: 46, 49, 50, 53, 54, 56, and 58 may be paired with a CAR having a sequence of SEQ ID NO: 64 for use according to the present invention (e.g., such a switch may be used in combination with an effector cell expressing such a CAR to effect a treatment described herein).

[0165] Also, by way of non-limiting example, the CAR-ID may comprise an alpha helix of a mouse coronin 1A protein. Also, by way of non-limiting example, the CAR-ID may comprise a dimerization and docking domain (DDD) of cAMP-dependent protein kinase A. The CAR-ID may comprise an anchoring domain (AD) of an A-kinase anchoring protein (AKAP). The CAR-ID may comprise DDD1 (SEQ ID NO: 60). The CAR-ID may comprise AD1 (SEQ ID NO: 59). The CAR-ID may comprise DDD2 (SEQ ID NO: 62). The CAR-ID may comprise AD2 (SEQ ID NO: 61).

[0166] Also, by way of non-limiting example, the CAR-ID may comprise a dimerization and docking domain of cAMP-dependent protein kinase A (e.g., DDD1 or DDD2), wherein the DDD has been modified with cysteines that form disulfide bonds between the DDD and an AD partner on a chimeric receptor (e.g., on the non-antibody extracellular domain). The CAR-ID may comprise a AD (e.g., AD1 or AD2), wherein the AD has been modified with cysteines that form disulfide bonds between the AD and a DDD partner on a chimeric receptor (e.g., on the non-antibody extracellular domain). These disulfide bonds may form a covalent interaction between AD1 and the DDD1 or between the AD2 and the DDD2. This may be advantageous to increase affinity of the non-antibody peptide for the CAR-ID, or vice versa.

### Chimeric Receptor Binding Small Molecule.

[0167] In some embodiments, the CAR-ID comprises or consists of a small molecule. The small molecule may not comprise a peptide. The small molecule may not comprise two or more amino acids linked by an amide bond. The small molecule may be a small molecule that is bound by a protein or peptide. The small molecule may be a small molecule that is bound by a protein or peptide, wherein the protein or peptide is present in the non-antibody extracellular domain of the chimeric receptor. The small molecule may be a small molecule that is bound by a protein or peptide with a high affinity. The small molecule may be a drug. The small molecule may be an inorganic compound. The small molecule may be an organic compound. The small molecule may be naturally occurring. The small molecule may not be naturally occurring. The small molecule may be synthetic. The small molecule may be selected from a steroid, a vitamin, a vitamer, a ligand, a receptor agonist, a receptor antagonist, an enzyme inhibitor, a DNA aptamer, a peptide nucleic acid (PNA), a PNA aptamer, a petoid, a substrate, a substrate analog, a metabolite, an antibiotic, a monosaccharide, a disaccharide, a lipid, a fatty acid, a nucleic acid, an alkaloid, a glycoside, a phenzine, a polyketide, a terpene and a tetrapyrrole, and portions thereof. By way of non-limiting example, the small molecule may be selected from the group consisting of DOTA, dinitrophenol, quinone, biotin, aniline, atrazine, an aniline-derivative, o-aminobenzoic acid, p-aminobenzoic acid, m-aminobenzoic acid, hydralazine, halothane, digoxigenin, benzene arsonate, lactose, trinitrophenol, biotin or a derivative thereof.

[0168] The small molecule may comprise a vitamin or a derivative thereof. The vitamin, by non-limiting example may be selected from Vitamin A, Vitamin B, Vitamin C, Vitamin D, Vitamin E and Vitamin K. The vitamin may be Vitamin C. The vitamin may be Vitamin D. The vitamin may comprise folate or a derivative thereof. The small molecule may comprise a vitamer. The small molecule may comprise a vitamin metabolite or vitamin precursor. The vitamer, by non-limiting example, may be selected from retinol, retinal, beta carotene, a carotenoid, thiamine, riboflavin, niacin, niacinamide, pantothenic acid, pyridoxine, pyridoxamine, pyridoxal, biotin, folic acid, folinic acid, cyanocobalamin, hydroxycobalamin, methylcobalamin, ascorbic acid, cholecalciferol, ergocalciferol, a tocopherol, a tocotrienol, a phylloquinone, and a menaquinone or a derivative thereof. The small molecule may comprise an antioxidant or a derivative thereof.

[0169] The small molecule may be an enzyme inhibitor. The small molecule may be selected, by non-limiting example, from a tyrosine kinase inhibitor, a protease inhibitor, a growth factor receptor inhibitor, a hormone receptor inhibitor, a janus kinase inhibitor, an anaplastic lymphoma kinase (ALK) inhibitor, a Bcl-2 inhibitor, a poly ADP ribose polymerase (PARP) inhibitor, a PI3K inhibitor, a Braf inhibitor, a MAP kinase inhibitor, a cyclin dependent kinase inhibitor and a heat shock protein inhibitor. The enzyme inhibitor may be selected from apatinib, bortezomib, imatinib, ibrutinib, seliciclib, bosutinib, cabozantinib, crizotinib, dabrafenib, dasatinib, doxorubicin, erlotinib, everolimus, gefitinib, imatinib, iniparib, lapatinib, LEE011, LGX818, milotinib, obatoclax, olaparib, pazopanib, PD-0332991, perifosine, ponatinib, regorafenib, ruxolitinib, salinomycin, sorafebnib, sunitinib, tamoxifen, temsirolimus, tofacitinib, trametinib, vandetanib and vemurafenib or a derivative thereof.

[0170] The small molecule may be less than about 1000 Da, 1100 Da, 1200 Da, 1300 Da, 1400 Da, 1500 Da, 1600 Da, 1700 Da, 1800 Da, 1900, Da, 2000 Da, 2100 Da, 2200 Da, 2300 Da, 2400 Da, 2500 Da, 2600 Da, 2700 Da, 2800 Da, 2900, Da or less than about 3000 Da. The switch may be less than about 1200 Da. The switch may be less than about 1500 Da. The CAR-EC switch may be less than about 2000 Da.

[0171] The small molecule may have a size on the order of about 10⁻⁸ m, about 10⁻⁹ m, about 10⁻¹⁰ m. The small molecule may have a size of less than about 10⁻⁷ m. The small molecule may have a size of less than about 10⁻⁸ m. The small molecule may have a size of less than about 10⁻⁹ m. The small molecule may have a size of less than about 10⁻¹⁰ m. The small molecule may have a size of less than about 10⁻¹¹ m. The small molecule may be less than about 10 nm, less than about 20 nm, less than about 30 nm, less than about 40 nm, less than about 50 nm, less than about 60 nm, less than about 70 nm, less than about 80 nm, less than about 90 nm, less than about 100 nm, less than about 110 nm, less than about 120 nm, less than about 130 nm, less than about 140 nm, less than about 150 nm, less than about 160 nm, less than about 170 nm, less than about 180 nm, less than about 190 nm, or less than about 200 nm wide at its widest dimension. The small molecule may be less than about 100 nm, less than about 200 nm wide, less than about 300 nm, less than about 400 nm, less than about 500 nm, less than about 600 nm, less than about 700 nm, less than about 800 nm, less than about 900 nm, or less than about 1000 nm wide, at its widest dimension.

[0172] The CAR-ID may comprise a hapten. The CAR-ID may induce an immune response when attached to a larger carrier molecule, such as a protein, antibody or antibody fragment. The CAR-ID may be Fluorescein isothiocyanate (FITC) or a derivative thereof. The CAR-ID may comprise biotin. The CAR-ID may comprise dinitrophenol.

[0173] Alternatively, the CAR-ID does not comprise a hapten. The CAR-ID may be selected from a steroid, a vitamin, a vitamer, a metabolite, an antibiotic, a monosaccharide, a disaccharide, a lipid, a fatty acid, a nucleic acid, an alkaloid, a glycoside, a phenzine, a polyketide, a terpene, and a tetrapyrrole, and portions thereof, and combinations thereof. The CAR-ID may be a penicillin drug or a derivative thereof.

[0174] The CAR-ID may be linked and/or conjugated to the targeting moiety. The targeting moiety may be a targeting antibody or an antigen binding portion of a targeting antibody and the CAR-ID may be linked and/or conjugated to an amino acid of the targeting antibody or antigen binding portion of an antibody. The amino acid of the targeting antibody or antigen binding portion of an antibody may be an unnatural amino acid. The targeting antibody or antigen binding portion of an antibody may be any targeting antibody or antigen binding portion of an antibody disclosed herein. The targeting antibody or antigen binding portion of an antibody may comprise a light chain selected from SEQ ID NOS: 17-25. The targeting antibody or antigen binding portion of an antibody may comprise a light chain selected from SEQ ID NOS: 17-25 and the unnatural amino acids may be located at respective sites shown in Table 1. The targeting antibody or antigen binding portion of an antibody may comprise a heavy chain selected from SEQ ID NOS: 2-15. The targeting antibody or antigen binding portion of an antibody may comprise a heavy chain selected from SEQ ID NOS: 2-15 and the unnatural amino acids may be located at respective sites shown in Table 1.

TABLE 1

| Antigen | clone | A | B | C | D | E | F |
|---|---|---|---|---|---|---|---|
| CD19 | FMC63 | LG68 | HS74 | LT109 | HA121 | LS202 | HK136 |

L = light chain,
H = heavy chain,
S = serine,
G = glycine,
R = arginine,
T = threonine,
A = alanine and
K = lysine

[0175] The targeting antibody or antigen binding portion of an antibody may be an anti-CD20 antibody or anti-CD20 antibody fragment. The targeting antibody or antigen binding portion of an antibody may be an anti-CD22 antibody or anti-CD22 antibody fragment. The targeting antibody or antigen binding portion of an antibody may be an anti-CD33 antibody or anti-CD33 antibody fragment. The targeting antibody or antigen binding portion of an antibody may be an anti-CD123 antibody or anti-CD123 antibody fragment. The targeting antibody or antigen binding portion of an antibody may be an anti-CLL1 antibody or anti-CLL1 antibody fragment. The targeting antibody or antigen binding portion of an antibody may be an anti-CEA antibody or anti-CEA antibody fragment. The targeting antibody or antigen binding portion of an antibody may be an anti-Her2 antibody or anti-Her2 antibody fragment. The targeting antibody or antigen binding portion of an antibody may be an anti-BCMA antibody or anti-BCMA antibody fragment. The targeting antibody or antigen binding portion of an antibody may be an anti-CS1 antibody or anti-CS1 antibody fragment. The targeting moiety may be a T cell receptor. The targeting moiety may be a soluble T cell receptor. The targeting soluble T cell receptor may bind an MHC-restricted NY-ESO-1 peptide.

[0176] The targeting antibody or antigen binding portion of an antibody may comprise a light chain selected from SEQ ID NOS: 247, 249, 251, 253, 255, 257, 259, 261, 263, 265, and 267. The targeting antibody or antigen binding portion of an antibody may comprise a light chain selected from SEQ ID NOS: 247, 249, 251, 253, 255, 257, 259, 261, 263, 265, and 267 and the unnatural amino acids may be located at respective sites shown in Table 2. The targeting antibody or antigen binding portion of an antibody may comprise a heavy chain selected from SEQ ID NOS: 248, 250, 252, 254, 256, 258, 260, 262, 264, 266, 268. The targeting antibody or antigen binding portion of an antibody may comprise a heavy chain selected from SEQ ID NOS: 248, 250, 252, 254, 256, 258, 260, 262, 264, 266, 268 and the unnatural amino acids may be located at respective sites shown in Table 2.

TABLE 2

| Antigen | clone | A | B | C | D | E | F |
|---|---|---|---|---|---|---|---|
| CD22 | hLL2 | LG74 | HS75 | LT114 | HA117 | LS207 | HK132 |
| | M971 | LG68 | HS78 | LT109 | HA125 | LS202 | HK140 |
| Her2 | Herceptin | LG68 | HS75 | LT109 | HA121 | LS202 | HK136 |
| CLL1 | 1075.7 | LG69 | HS75 | LA110 | HA124 | LS203 | HK139 |
| CD33 | hM195 | LG72 | HS75 | LT113 | HA117 | LS206 | HK132 |
| | Hp67.6 | LG72 | HP75 | LT113 | HA117 | LS206 | HK132 |
| CD123 | 26292 | LG68 | HS75 | LT109 | HA116 | LS202 | HK131 |
| | 32716 | LR72 | HS75 | LT113 | HA119 | LS206 | HK134 |

L = light chain,
H = heavy chain,
S = serine,
G = glycine,
R = arginine,
T = threonine,
A = alanine and
K = lysine

[0177] The one or more unnatural amino acids may be encoded by a codon that does not code for one of the twenty natural amino acids. The one or more unnatural amino acids may be encoded by a nonsense codon (stop codon). The stop codon may be an amber codon. The amber codon may comprise a UAG sequence. Herein, “UAG” and “TAG” may be used interchangeably in reference to amber codons. The stop codon may be an ochre codon. The ochre codon may comprise a UAA sequence. The stop codon may be an opal or umber codon. The opal or umber codon may comprise a UGA sequence. The one or more unnatural amino acids may be encoded by a four-base codon.

[0178] The one or more unnatural amino acids may be p-acetylphenylalanine (pAcF or pAcPhe). The one or more unnatural amino acids may be selenocysteine. The one or more unnatural amino acids may be p-fluorophenylalanine (pFPhe). The one or more unnatural amino acids may be selected from the group comprising p-azidophenylalanine (pAzF), p-azidomethylphenylalanine(pAzCH2F), p-benzoylphenylalanine (pBpF), p-propargyloxyphenylalanine (pPrF), p-iodophenylalanine (pIF), p-cyanophenylalanine (pCNF), p-carboxylmethylphenylalanine (pCmF), 3-(2-naphthyl)alanine (NapA), p-boronophenylalanine (pBoF), o-nitrophenylalanine (oNiF), (8-hydroxyquinolin-3-yl)alanine (HQA), selenocysteine, and (2,2′-bipyridin-5-yl)alanine (BipyA). The one or more unnatural amino acids may be 4-(6-methyl-s-tetrazin-3-yl)aminopheynlalanine.

[0179] The one or more unnatural amino acids may be (β-amino acids (β3 and β2), homo-amino acids, proline and pyruvic acid derivatives, 3-substituted alanine derivatives, glycine derivatives, ring-substituted phenylalanine and tyrosine derivatives, linear core amino acids, diamino acids, D-amino acids, N-methyl amino acids, or a combination thereof.

[0180] Additional examples of unnatural amino acids include, but are not limited to, 1) various substituted tyrosine and phenylalanine analogues such as O-methyl-L-tyrosine, p-amino-L-phenylalanine, 3-nitro-L-tyrosine, p-nitro-L-phenylalanine, m-methoxy-L-phenylalanine and p-isopropyl-L-phenylalanine; 2) amino acids with aryl azide and benzophenone groups that may be photo-cross-linked; 3) amino acids that have unique chemical reactivity including acetyl-L-phenylalanine and m-acetyl-L-phenylalanine, O-allyl-L-tyrosine, O-(2-propynyl)-L-tyrosine, p-ethylthiocarbonyl-L-phenylalanine and p-(3-oxobutanoyl)-L-phenylalanine; 4) heavy-atom-containing amino acids for phasing in X-ray crystallography including p-iodo and p-bromo-L-phenylalanine; 5) the redox-active amino acid dihydroxy-L-phenylalanine; 6) glycosylated amino acids including b-N-acetylglucosamine-O-serine and a-N-acetylgalactosamine-O-threonine; 7) fluorescent amino acids with naphthyl, dansyl, and 7-aminocoumarin side chains; 8) photocleavable and photoisomerizable amino acids with azobenzene and nitrobenzyl Cys, Ser, and Tyr side chains; 9) the phosphotyrosine mimetic p-carboxymethyl-L-phenylalanine; 10) the glutamine homologue homoglutamine; and 11) 2-aminooctanoic acid. The unnatural amino acid may be modified to incorporate a chemical group. The unnatural amino acid may be modified to incorporate a ketone group.

[0181] The one or more unnatural amino acids may comprise at least one oxime, carbonyl, dicarbonyl, hydroxylamine group or a combination thereof. The one or more unnatural amino acids may comprise at least one carbonyl, dicarbonyl, alkoxy-amine, hydrazine, acyclic alkene, acyclic alkyne, cyclooctyne, aryl/alkyl azide, norbornene, cyclopropene, trans-cyclooctene, or tetrazine functional group or a combination thereof.

[0182] The one or more unnatural amino acids may be incorporated into the targeting moiety and/or the CAR-ID by methods known in the art. Cell-based or cell-free systems may be used to alter the genetic sequence of the targeting moiety and/or the CAR-ID, thereby producing the targeting moiety and/or the CAR-ID with one or more unnatural amino acids. Auxotrophic strains may be used in place of engineered tRNA and synthetase. The one or more unnatural amino acids may be produced through selective reaction of one or more natural amino acids. The selective reaction may be mediated by one or more enzymes. In one non-limiting example, the selective reaction of one or more cysteines with formylglycine generating enzyme (FGE) may produce one or more formylglycines (see Rabuka et al., Nature Protocols 7:1052-1067 (2012), which is incorporated by reference in its entirety).

[0183] The one or more unnatural amino acids may take part in a chemical reaction to form a linker. The chemical reaction to form the linker may be a bioorthogonal reaction. The chemical reaction to form the linker may be click chemistry.

[0184] Additional unnatural amino acids are disclosed in Liu et al. (Annu Rev Biochem, 79:413-44, 2010), Wang et al. (Angew Chem Int Ed, 44:34-66, 2005) and PCT application numbers PCT/US2012/039472, PCT/US2012/039468, PCT/US2007/088009, PCT/US2009/058668, PCT/US2007/089142, PCT/US2007/088011, PCT/US2007/001485, PCT/US2006/049397, PCT/US2006/047822 and PCT/US2006/044682, all of which are incorporated by reference in their entireties.

### Second Region of the CAR-EC Switch: Targeting Moiety.

[0185] CAR-EC Switches comprise a CAR-ID and a targeting moiety.

[0186] The targeting moiety may bind to a cell surface molecule on a target. The cell surface molecule may comprise an antigen. The cell surface molecule may be selected from a protein, a lipid moiety, a glycoprotein, a glycolipid, a carbohydrate, a polysaccharide, a nucleic acid, an MI-IC-bound peptide, or a combination thereof. The cell surface molecule may comprise parts (e.g., coats, capsules, cell walls, flagella, fimbrae, and toxins) of bacteria, viruses, and other microorganisms. The cell surface molecule may be expressed by the target cell. The cell surface molecule may not be expressed by the target cell. By way of non-limiting example, the cell surface molecule may be a ligand expressed by a cell that is not the target cell and that is bound to the target cell or a cell surface molecule of the target cell. Also, by non-limiting example, the cell surface molecule may be a toxin, exogenous molecule or viral protein that is bound to a cell surface or cell surface receptor of the target cell.

[0187] The targeting moiety may be a targeting polypeptide. The targeting polypeptide may be a targeting antibody or antibody fragment. The antibody fragment may be an antigen binding portion of an antibody. The targeting antibody or antibody fragment may be an immunoglobulin (Ig). The immunoglobulin may be selected from an IgG, an IgA, an IgD, an IgE, an IgM, a fragment thereof (e.g., an antigen binding fragment or portion) or a modification thereof. The immunoglobulin may be IgG. The IgG may be IgG1. The IgG may be IgG2. The IgG may have one or more Fc mutations for modulating endogenous T cell FcR binding to the CAR-EC switch. The IgG may have one or more Fc mutations for removing the Fc binding capacity to the FcR of FcR-positive cells. Removal of the Fc binding capacity may reduce the opportunity for crosslinking of the CAR-EC to FcR positive cells, wherein crosslinking of the CAR-EC to FcR positive cells would activate the CAR-EC in the absence of the target cell. As such, modulating the endogenous T cell FcR binding to the CAR-EC switch may reduce an ineffective or undesirable immune response. The one or more Fc mutations may remove a glycosylation site. The one or more Fc mutations may be selected from E233P, L234V, L235A, delG236, A327G, A330S, P331S, N297Q and any combination thereof. The one or more Fc mutations may be in IgG1. The one or more Fc mutations in the IgG1 may be L234A, L235A, or both. Alternatively, or additionally, the one or more Fc mutations in the IgG1 may be L234A, L235E, or both. Alternatively, or additionally, the one or more Fc mutations in the IgG1 may be N297A. Alternatively, or additionally, the one or more mutations may be in IgG2. The one or more Fc mutations in the IgG2 may be V234A, V237A, or both.

[0188] The targeting antibody or antibody fragment may be an Fc null immunoglobulin or a fragment thereof.

[0189] The targeting antibody or antigen binding portion of an antibody may be a Fab. In some embodiments, a central tenant of the sCAR-T cells described herein is the orthogonality of CAR-ID-grafted switches in that they only interact with the target cell and sCAR and no other immune receptors or cell types. Lack of orthogonality has the potential to cause off-target effects. Thus, in some embodiments, Fabs may be desirable because their lack of an Fc domain removes the possibility of an Fc receptor-mediated off target binding. In some embodiments, their smaller size and shorter half-life (approximately 1-5 h for Fab vs 10-20 d for IgG provides better tumor penetration and greater temporal control over sCAR-T cell activation, in clinical translation. In addition, the Fab may differ from the IgG in valency, off-rate, or tissue distribution.

[0190] The targeting antibody fragment may be human, fully human, humanized, human engineered, non-human, and/or chimeric antibody. The non-human antibody may be humanized to reduce immunogenicity to humans, while retaining the specificity and affinity of the parental non-human antibody. Chimeric antibodies may refer to antibodies created through the joining of two or more antibody genes which originally encoded for separate antibodies. A chimeric antibody may comprise at least one amino acid from a first antibody and at least one amino acid from a second antibody, wherein the first and second antibodies are different. At least a portion of the antibody or antibody fragment may be from a bovine species, a human species, or a murine species. At least a portion of the antibody or antibody fragment may be from a rat, a goat, a guinea pig or a rabbit. At least a portion of the antibody or antibody fragment may be from a human. At least a portion of the antibody or antibody fragment antibody may be from cynomolgus monkey.

[0191] The targeting antibody or antibody fragment may be based on or derived from an antibody or antibody fragment from a mammal, bird, fish, amphibian, or reptile. Mammals include, but are not limited to, carnivores, rodents, elephants, marsupials, rabbits, bats, primates, seals, anteaters, cetaceans, odd-toed ungulates and even-toed ungulates. The mammal may be a human, non-human primate, mouse, sheep, cat, dog, cow, horse, goat, or pig.

[0192] In some embodiments, the targeting moiety comprised on the humanized CAR-EC switches disclosed herein is humanized. In some embodiments, the targeting moiety comprised on the humanized CAR-EC switches disclosed herein is humanized, and it binds CD19. In some embodiments, the targeting moiety specifically binds CD19 (i.e., no substantial off-target binding occurs or is observable). In some embodiments, the targeting moiety is an anti-CD19 antibody, or an antigen binding fragment of an anti-CD19 antibody. In particular embodiments, the targeting moiety comprises or consists of a humanized anti-CD19 antibody, or an antigen binding fragment of a humanized anti-CD19 antibody (e.g., any one of more of the humanized anti-CD19 antibodies or antigen binding fragments thereof disclosed herein). In particular embodiments, the targeting moiety comprises a humanized form of the anti-CD19 murine clone FMC63 antibody. For example, in some embodiments, the targeting moiety comprises a

[0193] The targeting antibody or an antibody fragment may target an antigen selected from, by non-limiting example, CD19, Her2, CLL1, CD33, CD123, EGFR, EGFRvIII, CD20, CD22, CS1, BCMA, CEA or a fragment thereof. The antigen may comprise a wildtype antigen. The antigen may comprise one or more mutations. The targeting antibody or antibody fragment may be a B cell targeting moiety. The targeting antibody or antibody fragment may be an anti-CD19 antibody or antibody fragment. The anti-CD19 antibody or antibody fragment may be selected from antibody clone huB4 (see, e.g., SEQ ID NOS: 223-224), FMC63 (see, e.g., SEQ ID NOS: 2-15, 17-25, 184-185), and 1D3 (see, e.g., SEQ ID NO: 207-208). The targeting antibody or antibody fragment may be an anti-CLL1 antibody or antibody fragment. The anti-CLL1 antibody or antibody fragment may be antibody clone 1075.7 (see, e.g., SEQ ID NOS: 193-194). The targeting antibody or antibody fragment may be an anti-CD123 antibody or antibody fragment. The anti-CD123 antibody or antibody fragment may be selected from antibody clone 32716 (see, e.g., SEQ ID NOS: 239-240) and 26292 (see, e.g., SEQ ID NOS: 241-242). The targeting antibody or antibody fragment may be an anti-CD22 antibody or antibody fragment. The anti-CD22 antibody or antibody fragment may be selected from antibody clone m972 (see, e.g., SEQ ID NOS: 211-212) and m971 (see, e.g., SEQ ID NOS: 209-210). The targeting antibody or antibody fragment may be an anti-CD20 antibody or antibody fragment. The anti-CD20 antibody or antibody fragment may be selected from antibody clone OFA (see, e.g., SEQ ID NOS: 219-220), RTX (see, e.g., SEQ ID NOS: 215-216), and GA101 (see, e.g., SEQ ID NOS: 217-218). The targeting antibody or antibody fragment may be an anti-BCMA antibody or antibody fragment. The anti-BCMA antibody or antibody fragment may be antibody clone BCMA-98 (see, e.g., SEQ ID NOS: 221-222. The targeting antibody or antibody fragment may be an anti-Her2 antibody or antibody fragment. The anti-Her2 antibody or antibody fragment may be selected from antibody clone trastuzumab (see, e.g., SEQ ID NOS: 187-188). The targeting antibody or antibody fragment may be an anti-CS1 antibody or antibody fragment. The anti-CS1 antibody or antibody fragment may be antibody clone elotuzumab (see, e.g., SEQ ID NOS: 243-244). The targeting antibody or antibody fragment may be an anti-CD33 antibody or antibody fragment. The anti-CD33 antibody or antibody fragment may be selected from antibody clone hM195 (see, e.g., SEQ ID NOS: 259-260) and HP67.6 (see, e.g., SEQ ID NOS: 237-238. The targeting antibody or antibody fragment may be an anti-EGFR antibody or antibody fragment. The anti-EGFR antibody or antibody fragment may be clone C225 (see e.g., SEQ ID NOS: 191-192). The targeting antibody or antibody fragment may be an anti-EGFRvIII antibody or antibody fragment. The anti-EGFRvIII antibody or antibody fragment may be clone Hu806 (see, e.g., SEQ ID NOS: 199-200). The targeting antibody or antibody fragment may be an anti-CEA antibody or antibody fragment. The anti-CEA antibody or antibody fragment may be antibody clone A5B7 (see, e.g., SEQ ID NOS: 225-226). The expression of each switch requires a heavy chain and light chain. In some embodiments, expression of each switch requires a heavy chain and light chain gene to be co-transfected into one or more expression cells (e.g., HEK). The CAR-ID may be located in only the heavy chain to provide a monovalent switch. The CAR-ID may be located in only the light chain to provide a monovalent switch. The CAR-ID may be located in both the heavy chain and the light chain to provide a bivalent switch. The CAR-ID may be located in both the heavy chain and the light chain to provide a multivalent switch.

[0194] The targeting antibody or antibody fragment may be an anti-CD19 antibody or a fragment thereof. The targeting polypeptide may be an anti-CD22 antibody. The targeting polypeptide may be an anti-BCMA antibody or a fragment thereof. The targeting polypeptide may be an anti-CS1 antibody or a fragment thereof. The targeting polypeptide may be an anti-EGFRvIII antibody or a fragment thereof. The targeting polypeptide may be an anti-Her2 antibody or a fragment thereof. The targeting polypeptide may comprise an anti-CD20 antibody or antibody fragment. The targeting polypeptide may comprise rituximab. The targeting polypeptide may comprise an anti-EGFR antibody or antibody fragment. The targeting polypeptide may comprise an anti-CEA antibody or antibody fragment. The targeting polypeptide may comprise an anti-CLL1 antibody or antibody fragment. The targeting polypeptide may comprise an anti-CD123 antibody or antibody fragment. The targeting polypeptide may comprise an anti-CD33 antibody or antibody fragment. The targeting polypeptide may not comprise an anti-EpCAM antibody or fragment thereof.

[0195] The targeting antibody or antibody fragment may be selected any commercially available antibody. The targeting antibody or antibody fragment may be selected from ado-trastuzumab emtansine, alemtuzumab, bevacizumab, brentuximab, vedotin, gemtuzumab, ozogamicin, ipilimumab, ibritumomab, tiuxetan, panitumumab, cetuximab, erbitux, rituximab, trastuzumab and fragments thereof.

[0196] The targeting antibody or antibody fragment may comprise an anti-CD19 antibody or fragment thereof. The targeting antibody or fragment thereof may comprise a light chain of the anti-CD19 antibody or fragment thereof. The light chain of the anti-CD19 antibody or fragment thereof may be encoded by a nucleotide sequence based on or derived from SEQ ID NO. 184. The nucleotide sequence may be about 99%, about 98%, about 97%, about 96%, about 95%, about 92%, about 90%, about 85%, about 80%, about 75%, about 70%, about 65%, about 60%, about 55%, about 50%, about 45%, about 40%, about 35%, about 30%, about 25%, about 20%, about 15%, about 10%, about 5% or about 2% identical to SEQ ID NO. 184. The targeting antibody or fragment thereof may comprise a heavy chain of the anti-CD19 antibody or fragment thereof. The heavy chain of the anti-CD19 antibody or fragment thereof may be encoded by a sequence based on or derived from SEQ ID NO. 185. The nucleotide sequence may be about 99%, about 98%, about 97%, about 96%, about 95%, about 92%, about 90%, about 85%, about 80%, about 75%, about 70%, about 65%, about 60%, about 55%, about 50%, about 45%, about 40%, about 35%, about 30%, about 25%, about 20%, about 15%, about 10%, about 5% or about 2% identical to SEQ ID NO. 185

[0197] The light chain of the anti-CD19 antibody or fragment thereof may be encoded by a nucleotide sequence based on or derived from a sequence selected from SEQ ID NOS: 207 and 223. The nucleotide sequence of the light chain may be about 99%, about 98%, about 97%, about 96%, about 95%, about 92%, about 90%, about 85%, about 80%, about 75%, about 70%, about 65%, about 60%, about 55%, about 50%, about 45%, about 40%, about 35%, about 30%, about 25%, about 20%, about 15%, about 10%, about 5% or about 2% identical to a sequence selected from SEQ ID NOS: 207 and 223. The targeting antibody or fragment thereof may comprise a heavy chain of the anti-CD19 antibody or fragment thereof. The heavy chain of the anti-CD19 antibody or fragment thereof may be encoded by a sequence based on or derived from a sequence selected from SEQ ID NOS: 208 and 224. The nucleotide sequence of the heavy chain may be about 99%, about 98%, about 97%, about 96%, about 95%, about 92%, about 90%, about 85%, about 80%, about 75%, about 70%, about 65%, about 60%, about 55%, about 50%, about 45%, about 40%, about 35%, about 30%, about 25%, about 20%, about 15%, about 10%, about 5% or about 2% identical to a sequence selected from SEQ ID NOS: 208 and 224.

[0198] The targeting antibody or antibody fragment may comprise an anti-CD19 antibody or fragment thereof. The targeting antibody or fragment thereof may comprise a light chain of the anti-CD19 antibody or fragment thereof. The light chain of the anti-CD19 antibody or fragment may comprise an amino acid sequence based on or derived from a sequence selected from SEQ ID NOS: 25 and 203. The amino acid sequence may be about 99%, about 98%, about 97%, about 96%, about 95%, about 92%, about 90%, about 85%, about 80%, about 75%, about 70%, about 65%, about 60%, about 55%, about 50%, about 45%, about 40%, about 35%, about 30%, about 25%, about 20%, about 15%, about 10%, about 5% or about 2% identical to SEQ ID NOS: 25 and 203. The targeting antibody or fragment thereof may comprise a heavy chain of the anti-CD19 or fragment thereof. The targeting antibody or fragment thereof may comprise a heavy chain of an anti-CD19 IgG. The heavy chain of the anti-CD19 IgG may comprise a sequence based on or derived from a sequence selected from SEQ ID NOS: 15 and 204. The amino acid sequence may be about 99%, about 98%, about 97%, about 96%, about 95%, about 92%, about 90%, about 85%, about 80%, about 75%, about 70%, about 65%, about 60%, about 55%, about 50%, about 45%, about 40%, about 35%, about 30%, about 25%, about 20%, about 15%, about 10%, about 5% or about 2% identical to a sequence selected from SEQ ID NOS: 15 and 204. The targeting antibody or fragment thereof may comprise a heavy chain of an anti-CD19 Fab. The heavy chain of the anti-CD19 Fab may comprise a sequence based on or derived from SEQ ID NO. 205. The targeting antibody or fragment thereof may comprise a heavy chain of an anti-CD19 Fab comprising or consisting of an amino acid sequence that may be about 99%, about 98%, about 97%, about 96%, about 95%, about 92%, about 90%, about 85%, about 80%, about 75%, about 70%, about 65%, about 60%, about 55%, about 50%, about 45%, about 40%, about 35%, about 30%, about 25%, about 20%, about 15%, about 10%, about 5% or about 2% identical to SEQ ID NO. 205.

[0199] The targeting antibody or fragment thereof may comprise a light chain of the anti-CLL1 antibody or fragment thereof. The light chain of the anti-CLL1 antibody or fragment thereof may be encoded by SEQ ID NO. 193. The light chain of the anti-CLL1 antibody or fragment thereof may be encoded by a sequence at least about 99%, about 98%, about 97%, about 96%, about 95%, about 92%, about 90%, about 85%, about 80%, about 75%, about 70%, about 65%, about 60%, about 55%, about 50%, about 45%, about 40%, about 35%, about 30%, about 25%, about 20%, about 15%, about 10%, about 5% or about 2% identical to SEQ ID NO. 193. The targeting antibody or fragment thereof may comprise a heavy chain of the anti-CLL1 antibody or fragment thereof. The heavy chain of the anti-CLL1 antibody or fragment thereof may be encoded by SEQ ID NO. 194. The heavy chain of the anti-CLL1 antibody or fragment thereof may be encoded by a sequence at least about 99%, about 98%, about 97%, about 96%, about 95%, about 92%, about 90%, about 85%, about 80%, about 75%, about 70%, about 65%, about 60%, about 55%, about 50%, about 45%, about 40%, about 35%, about 30%, about 25%, about 20%, about 15%, about 10%, about 5% or about 2% identical to SEQ ID NO. 194.

[0200] The targeting antibody or fragment thereof may comprise a light chain of the anti-CD22 antibody or fragment thereof. The light chain of the anti-CD22 antibody or fragment thereof may be encoded by a sequence selected from SEQ ID NOS:10, 12, ad 14. The light chain of the anti-CD22 antibody or fragment thereof may be encoded by a sequence at least about 99%, about 98%, about 97%, about 96%, about 95%, about 92%, about 90%, about 85%, about 80%, about 75%, about 70%, about 65%, about 60%, about 55%, about 50%, about 45%, about 40%, about 35%, about 30%, about 25%, about 20%, about 15%, about 10%, about 5% or about 2% identical to a sequence selected from SEQ ID NOS: 10, 12, ad 14. The targeting antibody or fragment thereof may comprise a heavy chain of the anti-CD22 antibody or fragment thereof. The heavy chain of the anti-CD22 antibody or fragment thereof may be a sequence selected from SEQ ID NOS:211, and 213. The heavy chain of the anti-CD22 antibody or fragment thereof may be encoded by a sequence at least about 99%, about 98%, about 97%, about 96%, about 95%, about 92%, about 90%, about 85%, about 80%, about 75%, about 70%, about 65%, about 60%, about 55%, about 50%, about 45%, about 40%, about 35%, about 30%, about 25%, about 20%, about 15%, about 10%, about 5% or about 2% identical to a sequence selected from SEQ ID NOS: 211, 213.

[0201] The targeting antibody or fragment thereof may comprise a light chain of the anti-CD20 antibody or fragment thereof. The light chain of the anti-CD20 antibody or fragment thereof may be encoded by a sequence selected from SEQ ID NOS: 189, 216, 218, and 220. The light chain of the anti-CD20 antibody or fragment thereof may be encoded by a sequence at least about 99%, about 98%, about 97%, about 96%, about 95%, about 92%, about 90%, about 85%, about 80%, about 75%, about 70%, about 65%, about 60%, about 55%, about 50%, about 45%, about 40%, about 35%, about 30%, about 25%, about 20%, about 15%, about 10%, about 5% or about 2% identical to a sequence selected from SEQ ID NOS: 189, 216, 218, and 220 The targeting antibody or fragment thereof may comprise a heavy chain of the anti-CD20 antibody or fragment thereof. The heavy chain of the anti-CD20 antibody or fragment thereof may be a sequence selected from SEQ ID NOS: 190, 215, 217, and 219. The heavy chain of the anti-CD20 antibody or fragment thereof may be encoded by a sequence at least about 99%, about 98%, about 97%, about 96%, about 95%, about 92%, about 90%, about 85%, about 80%, about 75%, about 70%, about 65%, about 60%, about 55%, about 50%, about 45%, about 40%, about 35%, about 30%, about 25%, about 20%, about 15%, about 10%, about 5% or about 2% identical to a sequence selected from SEQ ID NOS: 190, 215, 217, and 219. The chimeric antigen receptor-effector cell switch may comprise a heavy chain of SEQ ID NOS: 190, 215, 217, and 219 and a light chain of SEQ ID NOS: 189, 216, 218, and 220, or homologs thereof or fragments thereof.

[0202] The targeting antibody or fragment thereof may comprise a light chain of the anti-Her2 antibody or fragment thereof. The light chain of the anti-Her2 antibody or fragment thereof may be encoded by SEQ ID NO. 187. The light chain of the anti-Her2 antibody or fragment thereof may be encoded by a sequence at least about 99%, about 98%, about 97%, about 96%, about 95%, about 92%, about 90%, about 85%, about 80%, about 75%, about 70%, about 65%, about 60%, about 55%, about 50%, about 45%, about 40%, about 35%, about 30%, about 25%, about 20%, about 15%, about 10%, about 5% or about 2% identical to SEQ ID NO. 187. The targeting antibody or fragment thereof may comprise a heavy chain of the anti-Her2 antibody or fragment thereof. The heavy chain of the anti-Her2 antibody or fragment thereof may be encoded by SEQ ID NO. 188. The heavy chain of the anti-Her2 antibody or fragment thereof may be encoded by a sequence at least about 99%, about 98%, about 97%, about 96%, about 95%, about 92%, about 90%, about 85%, about 80%, about 75%, about 70%, about 65%, about 60%, about 55%, about 50%, about 45%, about 40%, about 35%, about 30%, about 25%, about 20%, about 15%, about 10%, about 5% or about 2% identical to SEQ ID NO. 188. The chimeric antigen receptor-effector cell switch may comprise a heavy chain of SEQ ID NO. 188 and a light chain of SEQ ID NO. 187, or homologs thereof, or fragments thereof.

[0203] The targeting antibody or fragment thereof may comprise a light chain of the anti-BCMA antibody or fragment thereof. The light chain of the anti-BCMA antibody or fragment thereof may be encoded by SEQ ID NO. 222. The light chain of the anti-BCMA antibody or fragment thereof may be encoded by a sequence at least about 99%, about 98%, about 97%, about 96%, about 95%, about 92%, about 90%, about 85%, about 80%, about 75%, about 70%, about 65%, about 60%, about 55%, about 50%, about 45%, about 40%, about 35%, about 30%, about 25%, about 20%, about 15%, about 10%, about 5% or about 2% identical to SEQ ID NO. 222. The targeting antibody or fragment thereof may comprise a heavy chain of the anti-BCMA antibody or fragment thereof. The heavy chain of the anti-BCMA antibody or fragment thereof may be encoded by a sequence selected from SEQ ID NOS: 221. The heavy chain of the anti-BCMA antibody or fragment thereof may be encoded by a sequence at least about 99%, about 98%, about 97%, about 96%, about 95%, about 92%, about 90%, about 85%, about 80%, about 75%, about 70%, about 65%, about 60%, about 55%, about 50%, about 45%, about 40%, about 35%, about 30%, about 25%, about 20%, about 15%, about 10%, about 5% or about 2% identical to a sequence selected from SEQ ID NOS: 221. The chimeric antigen receptor-effector cell switch may comprise a heavy chain of SEQ ID NOS: 221 and a light chain of SEQ ID NO. 222, or homologs thereof, or fragments thereof.

[0204] The targeting antibody or fragment thereof may comprise a light chain of the anti-CEA antibody or fragment thereof. The light chain of the anti-CEA antibody or fragment thereof may be encoded by SEQ ID NO. 226. The light chain of the anti-CEA antibody or fragment thereof may be encoded by a sequence at least about 99%, about 98%, about 97%, about 96%, about 95%, about 92%, about 90%, about 85%, about 80%, about 75%, about 70%, about 65%, about 60%, about 55%, about 50%, about 45%, about 40%, about 35%, about 30%, about 25%, about 20%, about 15%, about 10%, about 5% or about 2% identical to SEQ ID NO. 226. The targeting antibody or fragment thereof may comprise a heavy chain of the anti-CEA antibody or fragment thereof. The heavy chain of the anti-CEA antibody or fragment thereof may be encoded by SEQ ID NO. 225. The heavy chain of the anti-CEA antibody or fragment thereof may be encoded by a sequence at least about 99%, about 98%, about 97%, about 96%, about 95%, about 92%, about 90%, about 85%, about 80%, about 75%, about 70%, about 65%, about 60%, about 55%, about 50%, about 45%, about 40%, about 35%, about 30%, about 25%, about 20%, about 15%, about 10%, about 5% or about 2% identical to SEQ ID NO. 225. The chimeric antigen receptor-effector cell switch may comprise a heavy chain of SEQ ID NO. 225 and a light chain of SEQ ID NO. 226, or homologs thereof, or fragments thereof.

[0205] The targeting antibody or fragment thereof may comprise a light chain of the anti-CS1 antibody or fragment thereof. The light chain of the anti-CS1 antibody or fragment thereof may be encoded by SEQ ID NO. 243. The light chain of the anti-CS1 antibody or fragment thereof may be encoded by a sequence at least about 99%, about 98%, about 97%, about 96%, about 95%, about 92%, about 90%, about 85%, about 80%, about 75%, about 70%, about 65%, about 60%, about 55%, about 50%, about 45%, about 40%, about 35%, about 30%, about 25%, about 20%, about 15%, about 10%, about 5% or about 2% identical to SEQ ID NO. 243. The targeting antibody or fragment thereof may comprise a heavy chain of the anti-CS1 antibody or fragment thereof. The heavy chain of the anti-CS1 antibody or fragment thereof may be encoded by SEQ ID NO. 244. The heavy chain of the anti-CS1 antibody or fragment thereof may be encoded by a sequence at least about 99%, about 98%, about 97%, about 96%, about 95%, about 92%, about 90%, about 85%, about 80%, about 75%, about 70%, about 65%, about 60%, about 55%, about 50%, about 45%, about 40%, about 35%, about 30%, about 25%, about 20%, about 15%, about 10%, about 5% or about 2% identical to SEQ ID NO. 244. The chimeric antigen receptor-effector cell switch may comprise a heavy chain of SEQ ID NO. 244 and a light chain of SEQ ID NO. 243, or homologs thereof, or fragments thereof.

[0206] The targeting antibody or fragment thereof may comprise a light chain of the anti-CD33 antibody or fragment thereof. The light chain of the anti-CD33 antibody or fragment thereof may be encoded by SEQ ID NO. 195. The light chain of the anti-CD33 antibody or fragment thereof may be encoded by a sequence at least about 99%, about 98%, about 97%, about 96%, about 95%, about 92%, about 90%, about 85%, about 80%, about 75%, about 70%, about 65%, about 60%, about 55%, about 50%, about 45%, about 40%, about 35%, about 30%, about 25%, about 20%, about 15%, about 10%, about 5% or about 2% identical to SEQ ID NO. 195. The targeting antibody or fragment thereof may comprise a heavy chain of the anti-CD33 antibody or fragment thereof. The heavy chain of the anti-CD33 antibody or fragment thereof may be encoded by SEQ ID NO. 196. The heavy chain of the anti-CD33 antibody or fragment thereof may be encoded by a sequence at least about 99%, about 98%, about 97%, about 96%, about 95%, about 92%, about 90%, about 85%, about 80%, about 75%, about 70%, about 65%, about 60%, about 55%, about 50%, about 45%, about 40%, about 35%, about 30%, about 25%, about 20%, about 15%, about 10%, about 5% or about 2% identical to SEQ ID NO. 196. The chimeric antigen receptor-effector cell switch may comprise a heavy chain of SEQ ID NO. 196 and a light chain of SEQ ID NO. 195, or homologs thereof, or fragments thereof.

[0207] The targeting antibody or antibody fragment may comprise a nucleotide sequence selected from SEQ ID NOs: 184-196, 207-236. The targeting polypeptide may be based on or derived from a nucleotide selected from SEQ ID NOs: 184-196, 207-236. The targeting antibody or antibody fragment may comprise a humanized form of a nucleotide sequence selected from SEQ ID NOs: 184-196, 207-236.

[0208] The targeting antibody or antibody fragment may comprise an amino acid sequence selected from SEQ ID NOs: 2-15, 17-25, 27-35, 197-206, 237-244, 246-266. The targeting polypeptide may be based on or derived from an amino acid sequence selected from SEQ ID NOs: 2-15, 17-25, 27-35, 197-206, 237-244, 246-266. The targeting antibody or antibody fragment may comprise a humanized form of an amino acid sequence selected from SEQ ID NOs: 2-15, 17-25, 27-35, 197-206, 237-244, 246-266.

[0209] Thus, the targeting moiety may be, e.g., an immunoglobulin (Ig) that binds CD19. The immunoglobulin may be selected from an IgG, an IgA, an IgD, an IgE, an IgM, an antigen-binding fragment thereof, and a modification thereof. The immunoglobulin may be IgG. The IgG may be IgG1. The IgG may be IgG2. The IgG may have one or more Fc mutations for modulating endogenous T cell FcR binding to the switch. The IgG may have one or more Fc mutations for removing the Fc binding capacity to the FcR of FcR-positive cells. Removal of the Fc binding capacity may reduce the opportunity for crosslinking of the chimeric receptor-EC to FcR positive cells, wherein crosslinking of the chimeric receptor -EC to FcR positive cells would activate the chimeric receptor -EC in the absence of the target cell. As such, modulating the endogenous T cell FcR binding to the chimeric receptor -EC switch may reduce an ineffective or undesirable immune response. The one or more Fc mutations may remove a glycosylation site. The one or more Fc mutations may be selected from E233P, L234V, L235A, delG236, A327G, A330S, P331S, N297Q and any combination thereof. The one or more Fc mutations may be in IgG1. The one or more Fc mutations in the IgG1 may be L234A, L235A, or both. Alternatively, or additionally, the one or more Fc mutations in the IgG1 may be L234A, L235E, or both. Alternatively, or additionally, the one or more Fc mutations in the IgG1 may be N297A. Alternatively, or additionally, the one or more mutations may be in IgG2. The one or more Fc mutations in the IgG2 may be V234A, V237A, or both.

[0210] The targeting moiety may be an Fc null immunoglobulin that binds CD19, or an antigen-binding fragment thereof.

[0211] The targeting moiety may be human, fully human, humanized, human engineered, non-human, and/or chimeric antibody. The non-human antibody may be humanized to reduce immunogenicity to humans, while retaining the specificity and affinity of the parental non-human antibody. Chimeric antibodies may refer to antibodies created through the joining of two or more antibody genes which originally encoded for separate antibodies. A chimeric antibody may comprise at least one amino acid from a first antibody and at least one amino acid from a second antibody, wherein the first and second antibodies are different. At least a portion of the targeting moiety may be from a bovine species, a human species, or a murine species. At least a portion of the targeting moiety may be from a rat, a goat, a guinea pig or a rabbit. At least a portion of the targeting moiety may be from a human. At least a portion of the targeting moiety may be from cynomolgus monkey. The targeting moiety may be a humanized single domain antibody. The single domain antibody may be a humanized camelid.

[0212] The targeting moiety may be based on or derived from an anti-CD19 antibody or a CD19-binding antibody fragment from, e.g., a mammal, bird, fish, amphibian, reptile. Mammals include, but are not limited to, carnivores, rodents, elephants, marsupials, rabbits, bats, primates, seals, anteaters, cetaceans, odd-toed ungulates and even-toed ungulates. The mammal may be a human, non-human primate, mouse, sheep, cat, dog, cow, horse, goat, or pig.

[0213] The targeting moiety may comprise a humanized anti-CD19 antibody or an antigen-binding fragment thereof. The targeting moiety may comprise a humanized FMC63 antibody or an antigen-binding fragment thereof. The anti-CD19 antibody or antigen-binding fragment thereof may comprise a humanized light chain of the anti-CD19 antibody or an antigen-binding fragment thereof. The targeting moiety may comprise a humanized light chain of the FMC63 antibody (SEQ ID NO: 25) or an antigen-binding fragment thereof. The anti-CD19 antibody or antigen-binding fragment thereof may comprise a humanized light chain of the FMC63 antibody, or an antigen-binding fragment thereof. The humanized light chain of the anti-CD19 antibody or antigen-binding fragment may comprise an amino acid sequence of any one of SEQ ID NOS: 17-25 or any one of SEQ ID NOS: 27-35. The amino acid sequence of the humanized light chain of the anti-CD19 antibody or antigen-binding fragment may be about 99%, about 98%, about 97%, about 96%, about 95%, about 92%, about 90%, about 85%, about 80%, about 75%, about 70%, about 65%, about 60%, about 55%, about 50%, about 45%, about 40%, about 35%, about 30%, about 25%, about 20%, about 15%, about 10%, about 5% or about 2% identical to any one of SEQ ID NOS: 17-25 or any one of SEQ ID NOS: 27-35. The targeting moiety may comprise a humanized heavy chain of the anti-CD19 antibody or an antigen-binding fragment thereof. The anti-CD19 antibody or antigen-binding fragment thereof may comprise a humanized heavy chain of the anti-CD19 antibody or an antigen-binding fragment thereof. The targeting moiety may comprise a humanized heavy chain of the FMC63 antibody (SEQ ID NO: 15) or an antigen-binding fragment thereof. The anti-CD19 antibody or antigen-binding fragment thereof may comprise a humanized heavy chain of the FMC63 antibody, or an antigen-binding fragment thereof. The humanized heavy chain of the anti-CD19 antibody or antigen-binding fragment may comprise an amino acid sequence of any one of SEQ ID NOS: 2-15. The amino acid sequence of the humanized heavy chain of the anti-CD19 antibody or antigen-binding fragment may be about 99%, about 98%, about 97%, about 96%, about 95%, about 92%, about 90%, about 85%, about 80%, about 75%, about 70%, about 65%, about 60%, about 55%, about 50%, about 45%, about 40%, about 35%, about 30%, about 25%, about 20%, about 15%, about 10%, about 5% or about 2% identical to any one of SEQ ID NOS: 2-15. The targeting moiety may comprise a humanized light chain and a humanized heavy chain of the FMC63 antibody (SEQ ID NO: 15). For example, the targeting moiety may comprise a humanized light chain comprising or consisting of an amino acid sequence of an one of SEQ ID NOS: 17-24 or any one of SEQ ID NOS: 27-34 and the targeting moiety may comprise a humanized heavy chain comprising or consisting of an amino acid sequence of an one of SEQ ID NOS: 2-14.

### Humanization

[0214] Numerous methods for humanization are known in the art and are acceptable for making the humanized antibodies (e.g., humanized anti-CD19 antibodies, or antigen binding fragments or portions thereof) comprised in the CAR-EC switches disclosed herein. There are four general steps to humanize a monoclonal antibody. These are: (1) determining the nucleotide and predicted amino acid sequence of the starting antibody light and heavy variable domains; (2) designing the humanized antibody, i.e., deciding which antibody framework region to use during the humanizing process; (3) the actual humanizing methodologies/techniques; and (4) the transfection and expression of the humanized antibody. See, for example, U.S. Pat. Nos. 4,816,567; 5,807,715; 5,866,692; 6,331,415; 5,530,101; 5,693,761; 5,693,762; 5,585,089; and 6,180,370.

[0215] A number of “humanized” antibody molecules comprising an antigen-binding site derived from a non-human immunoglobulin have been described, including chimeric antibodies having rodent or modified rodent V regions and their associated CDRs fused to human constant domains. See, for example, Winter et al., 1991, Nature 349:293-299; Lobuglio et al., 1989, Proc. Nat. Acad. Sci. USA 86:4220-4224; Shaw et al., 1987, J Immunol. 138:4534-4538; and Brown et al., 1987, Cancer Res. 47:3577-3583. Other references describe rodent CDRs grafted into a human supporting framework region (FR) prior to fusion with an appropriate human antibody constant domain. See, for example, Riechmann et al., 1988, Nature 332:323-327; Verhoeyen et al., 1988, Science 239:1534-1536; and Jones et al., 1986, Nature 321:522-525. Another reference describes rodent CDRs supported by recombinantly engineered rodent framework regions. See, for example, European Patent Publ. No. 0519596. These “humanized” molecules are designed to minimize unwanted immunological response toward rodent anti-human antibody molecules which limits the duration and effectiveness of therapeutic applications of those moieties in human recipients. For example, the antibody constant region can be engineered such that it is immunologically inert (e.g., does not trigger complement lysis). See, e.g., PCT Publ. No. WO99/58572; UK Patent Application No. 9809951.8. Other methods of humanizing antibodies that may also be utilized are disclosed by Daugherty et al., 1991, Nucl. Acids Res. 19:2471-2476 and in U.S. Pat. Nos. 6,180,377; 6,054,297; 5,997,867; 5,866,692; 6,210,671; and 6,350,861; and in PCT Publ. No. WO 01/27160.

[0216] In yet another alternative, fully human antibodies may be obtained by using commercially available mice that have been engineered to express specific human immunoglobulin proteins. Transgenic animals that are designed to produce a more desirable or more robust immune response may also be used for generation of humanized or human antibodies. Examples of such technology are Xenomouse™ from Abgenix, Inc. (Fremont, Calif.), HuMAb-Mouse® and TC Mouse™ from Medarex, Inc. (Princeton, N.J.), and the Veloclmmune® mouse from Regeneron Pharmaceuticals, Inc. (Tarrytown, N.Y.).

[0217] In an alternative, antibodies may be made recombinantly and expressed using any method known in the art. In another alternative, antibodies may be made recombinantly by phage display technology. See, for example, U.S. Pat. Nos. 5,565,332; 5,580,717; 5,733,743; and 6,265,150; and Winter et al., 1994, Annu. Rev. Immunol. 12:433-455. Alternatively, the phage display technology (McCafferty et al., 1990, Nature 348:552-553) can be used to produce human antibodies and antibody fragments in vitro, from immunoglobulin variable (V) domain gene repertoires from unimmunized donors. According to this technique, antibody V domain genes are cloned in-frame into either a major or minor coat protein gene of a filamentous bacteriophage, such as M13 or fd, and displayed as functional antibody fragments on the surface of the phage particle. Because the filamentous particle contains a single-stranded DNA copy of the phage genome, selections based on the functional properties of the antibody also result in selection of the gene encoding the antibody exhibiting those properties. Thus, the phage mimics some of the properties of the B cell. Phage display can be performed in a variety of formats; see, e.g., Johnson, Kevin S, and Chiswell, David J., 1993, Current Opinion in Structural Biology 3:564-571. Several sources of V-gene segments can be used for phage display. Clackson et al., 1991, Nature 352:624-628 isolated a diverse array of anti-oxazolone antibodies from a small random combinatorial library of V genes derived from the spleens of immunized mice. A repertoire of V genes from unimmunized human donors can be constructed and antibodies to a diverse array of antigens (including self-antigens) can be isolated essentially following the techniques described by Mark et al., 1991, J. Mol. Biol. 222:581-597, or Griffith et al., 1993, EMBO J. 12:725-734. In a natural immune response, antibody genes accumulate mutations at a high rate (somatic hypermutation). Some of the changes introduced will confer higher affinity, and B cells displaying high-affinity surface immunoglobulin are preferentially replicated and differentiated during subsequent antigen challenge. This natural process can be mimicked by employing the technique known as “chain shuffling.” (Marks et al., 1992, Bio/Technol. 10:779-783). In this method, the affinity of “primary” human antibodies obtained by phage display can be improved by sequentially replacing the heavy and light chain V region genes with repertoires of naturally occurring variants (repertoires) of V domain genes obtained from unimmunized donors. This technique allows the production of antibodies and antibody fragments with affinities in the pM-nM range. A strategy for making very large phage antibody repertoires (also known as “the mother-of-all libraries”) has been described by Waterhouse et al., 1993, Nucl. Acids Res. 21:2265-2266. Gene shuffling can also be used to derive human antibodies from rodent antibodies, where the human antibody has similar affinities and specificities to the starting rodent antibody. According to this method, which is also referred to as “epitope imprinting”, the heavy or light chain V domain gene of rodent antibodies obtained by phage display technique is replaced with a repertoire of human V domain genes, creating rodent-human chimeras. Selection on antigen results in isolation of human variable regions capable of restoring a functional antigen-binding site, i.e., the epitope governs (imprints) the choice of partner. When the process is repeated in order to replace the remaining rodent V domain, a human antibody is obtained (see PCT Publ. No. WO 93/06213). Unlike traditional humanization of rodent antibodies by CDR grafting, this technique provides completely human antibodies, which have no framework or CDR residues of rodent origin.

[0218] In particular embodiments, an antibody, (e.g., an anti-CD19 antibody) is humanized according to the method described herein in Example 1. Briefly, in this non-limiting example, the FMC63 amino acid sequence was compared to murine and human germline sequences using IgBLAST (NCBI) and mutations of framework differences between the murine FMC63 VH and VL domains as compared to the VH and VL domains in human IGHV4-59 were made in the FMC63 sequence to render the sequence more identical to the human germline sequence. This process resulted in the production of several humanized heavy chain sequences (Table 3) and light chain sequences (Table 4), which were then modified into CAR-EC switches via the addition of a CAR-ID as an N-terminal fusion to the VL. The humanized switches comprising various pairs of humanized heavy and light chain sequences were tested for CD19 binding affinity and for efficacy for inducing cytotoxicity of CD19-expressing cells, as described in Examples 3 and 4, respectively.

### Linkers

[0219] The switches disclosed herein may comprise one or more linkers. A linker may provide a switch flexibility, length or geometry optimal for facilitating an interaction or effect of the effector cell on the target cell. The switches disclosed herein may comprise two or more linkers. The switches disclosed herein may comprise three or more linkers. The switches disclosed herein may comprise four or more linkers. The switches disclosed herein may comprise 5, 6, 7, 8, 9, 10 or more linkers. The two or more linkers may be the same. At least two of the three or more linkers may be the same. The two or more linkers may be different. At least two of the three or more linkers may be different.

[0220] The linker may comprise a peptide. The linker may comprise a rigid peptide (such as EAAAKEAAAKEAAAKA (SEQ ID NO. 163)). The linker may comprise a flexible peptide such as GGGGS (SEQ ID NO. 93, n=1). The linker may comprise a sequence selected from SEQ ID NOS: 93-103, 116-137, and 163. Flexible and rigid linkers are understood by a person of skill in the art and are described in Chen et al. (Adv Drug Deliv Rev. 2013 65: 1357-1369, incorporated by reference herein in its entirety). Switch linker design may be critical to the expression yields and the potency of the switch. The linker may connect the CAR-ID to the targeting antibody sequence by fusion and grafting. Design of the linker may directly impact the stability (e.g., thermal stability, proteolytic stability) of the switch. The linker may further dictate how the peptide is presented to the CAR, especially in the distance and relative orientation to the switch. For example, a flexible linker may present many different orientations, while a rigid linker may form an alpha helix and present only one orientation of the peptide epitope relative to the antibody.

[0221] The linker may be at least about 1, at least about 2, at least about 3, at least about 4, at least about 5, at least about 6, at least about 7, at least about 8, at least about 9 or at least about 10 amino acids in length. The one or more linkers may comprise about 5, about 10, about 15, about 20, about 25, about 30, about 35, about 40, about 45, about 50, about 55, about 60, about 70, about 80, about 90 or about 100 amino acids.

[0222] The linker may be located at the N terminus or the C terminus of the CAR-ID (e.g., a polypeptide CAR-ID) to graft the CAR-ID to the targeting moiety. A first linker may be fused to the N terminus of the CAR-ID (e.g., a polypeptide CAR-ID) and a second linker may be fused to the C terminus of the CAR-ID. The CAR-ID may be grafted into an internal site of a targeting moiety with a linker on either end of the CAR-ID.

[0223] The linker may be located at the N terminus or the C terminus of the targeting moiety (e.g., an anti-CD19 antibody, or an antigen binding portion thereof) to graft the targeting moiety into the CAR-ID. A first linker may be fused to the N terminus of the targeting moiety and a second linker may be fused to the C terminus of the targeting moiety. The targeting moiety may be grafted into an internal site of the CAR-ID with a linker on either end of the targeting moiety.

[0224] The linker may be comprised of the sequence (GGGGS)ₙ, (SEQ ID NO:93), wherein n may be 1, 2, 3, 4, 5 or more. The linker may be comprised of the sequence (GGS)ₙ, (SEQ ID NO:95), wherein n may be 1, 2, 3, 4, 5 or more. The linker may comprise a sequence selected from SEQ ID NOS: 93-103. The linker may comprise the sequence GGGGS (SEQ ID NO: 93).

[0225] In some embodiments, the linker is fused to the targeting moiety. In some embodiments, the linker is fused to the CAR-ID. In some embodiments, the linker is fused to the CAR-ID and the targeting moiety. In some embodiments, the linker may be comprised of the sequence (GGGGS)ₙ, (SEQ ID NO:93), wherein n may be 1, 2, 3, 4, 5 or more, and where in the linker is fused to the CAR-ID, fused to the targeting moiety, or fused to both the CAR-ID and the targeting moiety.

[0226] The linker may be a bifunctional linker. The linker may be a heterobifunctional linker. The linker may be a homobifunctional linker. The linker may further comprise one or more polyethylene glycol (PEG) subunits. The linker may comprise at least four PEG subunits. The linker may comprise at least 10 PEG subunits. The linker may comprise at least 20 PEG subunits. The linker may comprise at least 30 PEG subunits. The linker may comprise an azide at one end. The linker may comprise an aminooxy at one end. The linker may be an azide-PEG-aminooxy linker. The linker may comprise cyclooctyne at one end. The linker may be a PEG-cyclooctyne linker. The linker may comprise triazole. The triazole may be a 1,2,3-triazole or a 1,2,4-triazole. The linker may be a NHS-ester linker. The linker may be a TriA linker. The linker may be attached to the CAR-ID. The linker may be attached to the CAR-ID by oxime ligation.

[0227] Some additional exemplary linkers and methods of constructing linkers can be found in WO2014/153002, which is incorporated herein by reference in its entirety.

[0228] The linker may be attached to a CAR-ID. The linker may be attached to a targeting moiety. The linker may attach a CAR-ID to a targeting moiety. The one or more linkers may attach the one or more CAR-IDs to the one or more targeting moieties. The one or more linkers may attach the one or more CAR-IDs to the one or more targeting moieties in a site-specific manner. Attachment in a site-specific manner may comprise attaching the one or more CAR-IDs to a predetermined site on the one or more targeting moieties. Alternatively, or additionally, attachment in a site-specific manner may comprise attaching the one or more CAR-IDs to an unnatural amino acid in the one or more targeting moieties. The one or more linkers may attach the one or more CAR-IDs to the one or more targeting moieties in a site-independent manner. Attachment in a site-independent manner may comprise attaching the one or more CAR-IDs to a random site on the one or more targeting moieties. The CAR-ID may be attached to 1, 2, 3, 4, 5 or more targeting moieties in a site-specific manner. The CAR-ID may be attached to 1, 2, 3, 4, 5 or more targeting moieties in a site-independent manner. Alternatively, the targeting moiety may be attached to 1, 2, 3, 4, 5 or more CAR-IDs in a site-specific manner. Attachment in a site-specific manner may comprise attaching the one or more targeting moieties to a predetermined site on the one or more CAR-IDs. The targeting moiety may be attached to 1, 2, 3, 4, 5 or more CAR-IDs in a site-independent manner. Attachment in a site-independent manner may comprise attaching the one or more targeting moieties to a random site on the one or more CAR-IDs.

[0229] The one or more linkers may be coupled to the CAR-ID, the targeting moiety, or a combination thereof. The one or more linkers may be coupled to the CAR-ID to form one or more switch intermediates of the Formula IIA: L1-X or Formula II: X-L1, wherein X is the CAR-ID and L1 is the linker. The one or more linkers may be coupled to the CAR-ID by an oxime. The one or more linkers may be coupled to the CAR-ID by a cyclooctyne, cyclopropene, aryl/alkyl azides, trans-cyclooctene, norborene, tetrazine, or a combination thereof. The one or more linkers may be coupled to the CAR-ID by a covalent bond, non-covalent bond, ionic bond, or a combination thereof. The one or more linkers may be coupled to the targeting moiety to form one or more switch intermediates of the Formula IIIA: L1-Y or Formula III: Y-L1, wherein Y is the targeting moiety and L1 is the linker. The one or more linkers may be coupled to the targeting moiety by an oxime. The one or more linkers may be coupled to the targeting moiety by a cyclooctyne, cyclopropene, aryl/alkyl azides, trans-cyclooctene, norborene, tetrazine, or a combination thereof. The one or more linkers may be coupled to the targeting moiety by a covalent bond, non-covalent bond, ionic bond, or a combination thereof.

[0230] The targeting moiety may comprise one or more amino acids. The one or more amino acids may comprise a natural amino acid. The linker may couple with one or more natural amino acids on the targeting moiety. The one or more amino acids may comprise one or more unnatural amino acids. The linker may couple with one or more unnatural amino acids on the targeting moiety. The linker may couple with an amino acid which is the product of site-specific mutagenesis. The linker may couple with a cysteine which is the product of site-specific mutagenesis. The linker (e.g., substituted maleimide) may couple with a cysteine which is the product of site-specific mutagenesis, as well as a native cysteine residue. Two linkers, each with complementary reactive functional groups, may couple with one another.

[0231] The one or more linkers may be a cleavable linker. The one or more linkers may be a non-cleavable linker. The one or more linkers may be a flexible linker. The one or more linkers may be an inflexible linker. The linker may be a bifunctional linker. A bifunctional linker may comprise a first functional group on one end and a second functional group on the second end. The bifunctional linker may be heterobifunctional linker. A heterobifunctional linker may comprise a first functional group on one end and a second functional group on the second end, wherein the first functional group and the second functional group are different. The bifunctional linker may be a homobifunctional linker. A homobifunctional linker may comprise a first functional group on one end and a second functional group on the second end, wherein the first functional group and the second functional group are the same.

[0232] The linker may comprise a chemical bond. The linker may comprise a functional group. The linker may comprise a polymer. The polymer may be a polyethylene glycol. The linker may comprise an amino acid.

[0233] The linker may comprise one or more functional groups. The linker may comprise two or more functional groups. The linker may comprise three or more functional groups. The linker may comprise four or more functional groups. The linker may comprise 5, 6, 7, 8, 9, 10 or more functional groups. The linker may be a bifunctional ethylene glycol linker.

[0234] The linker may comprise ethylene glycol. The linker may comprise about 1, about 2, about 3, about 4, about 5, about 6, about 7, about 8, about 9, about 10, about 11, about 12, about 13, about 14, about 15, about 16, about 17, about 18, about 19 or about 20 or more ethylene glycol subunits. The linker may comprise 4 or more ethylene glycol subunits. The linker may comprise 8 or more ethylene glycol subunits. The linker may comprise 10 or more ethylene glycol subunits. The linker may comprise 12 or more ethylene glycol subunits. The linker may comprise 15 or more ethylene glycol subunits. The linker may comprise 20 or more ethylene glycol subunits. The linker may comprise 25 or more ethylene glycol subunits. The linker may comprise 30 or more ethylene glycol subunits. The linker may comprise 35 or more ethylene glycol subunits.

[0235] The linker may comprise PEG. The linker may comprise about 1, about 2, about 3, about 4, about 5, about 6, about 7, about 8, about 9, about 10, about 11, about 12, about 13, about 14, about 15, about 16, about 17, about 18, about 19 or about 20 or more polyethylene glycol (PEG) subunits. The linker may comprise 4 or more polyethylene glycol (PEG) subunits. The linker may comprise 8 or more PEG subunits. The linker may comprise 10 or more PEG subunits. The linker may comprise 12 or more PEG subunits. The linker may comprise 15 or more PEG subunits. The linker may comprise 20 or more PEG subunits. The linker may comprise 25 or more PEG subunits. The linker may comprise 30 or more PEG subunits. The linker may comprise 35 or more PEG subunits.

[0236] The linker may comprise a triazole. The triazole may be a 1,2,3-triazole. The triazole may be a 1,2,4-triazole.

[0237] The linker may comprise an aryl or a heteroaryl. The linker may comprise an aryl. The aryl may be phenyl. The phenyl may be disubstituted. The disubstituted phenyl may be 1,4-disubstituted phenyl. The disubstituted phenyl may be 1,3-disubstituted phenyl. The phenyl may be trisubstituted. The phenyl may be tetrasubstituted. Two of the substituents of the substituted phenyl may be NO2. In some instances, the linker does not comprise a benzyl substituent.

[0238] The linker may comprise one or more PEG units. The linker may comprise multiple PEG units. The linker may comprise 2 or more PEG units. The linker may comprise 3 or more PEG units. The linker may comprise 4 or more PEG units. The linker may comprise 5 or more PEG units. The linker may comprise 6 or more PEG units. The linker may comprise 7 or more PEG units. The linker may comprise 8 or more PEG units. The linker may comprise 9 or more PEG units. The linker may comprise 10 or more PEG units. The linker may comprise 11 or more PEG units. The linker may comprise 12 or more PEG units. The linker may comprise 13 or more PEG units. The linker may comprise 14 or more PEG units.

[0239] The linker may comprise an amide on one end. The linker may comprise an amide on one end and an amine on the other end. The linker may comprise an amide on one end and a triazole on the other end.

[0240] The one or more linkers may comprise a 1,4-dicarboxylic moiety. The one or more linkers may comprise a 1,3-dinitro substituted phenyl moiety.

[0241] The one or more linkers may comprise one or more reactive functional groups. The reactive functional group may react with a complementary reactive functional group on a coupling partner. The reaction of the reactive functional group on the linker to a complementary reactive functional group on a coupling partner may occur prior to incorporation of the linker into the CAR-EC switch.

[0242] The linker may comprise at least one reactive functional group selected from alkoxy-amine, hydrazine, aryl/alkyl azide, alkyne, alkene, tetrazine, dichlorotriazine, tresylate, succinimidyl carbonate, benzotriazole carbonate, nitrophenyl carbonate, trichlorophenyl carbonate, carbonylimidazole, succinimidyl succinate, maleimide, vinylsulfone, haloacetamide, and disulfide. The alkene may be selected from norbornene, trans-cyclooctene, and cyclopropene. The linker may comprise at least one alkoxy amine. The linker may comprise at least one azide. The linker may comprise at least one cyclooctyne. The linker may comprise at least one tetrazine.

[0243] The one or more linkers may comprise an alkoxy-amine (or aminooxy) group, azide group and/or cyclooctyne group at one or more termini. The one or more linkers may comprise an alkoxy-amine at one terminus and an azide group at the other terminus. The one or more linkers may comprise an alkoxy-amine at one terminus and a cyclooctyne group at the other terminus. The alkoxy-amine may form a stable oxime with a ketone group on an amino acid. The alkoxy-amine may form a stable oxime with a ketone group on an unnatural amino acid. The ketone group may be on a p-acetyl phenylalanine (pAcF).

[0244] One or more linkers may be formed by reaction of reactive functional group on the CAR-ID with a complementary reactive functional group of a linker that is attached to the targeting moiety. One or more linkers may be formed by reaction of an amino acid or another reactive functional group on the targeting moiety with a complementary reactive functional group of a linker that is attached to the CAR-ID. One or more linkers may be formed by reaction of a linker that is attached to the CAR-ID with another linker that is attached to the targeting moiety.

[0245] The linker may be the product of a bioorthogonal reaction. For example, amino acids that contain ketone, azide, alkyne, alkene, and tetrazine side chains can be genetically encoded in response to nonsense and frameshift codons. These side chains can act as chemical handles for bioorthogonal conjugation reactions (Kim et al., Curr Opin Chem Bio 17:412-419 (2013), which is incorporated by reference in its entirety). The linker may comprise an oxime, a tetrazole, a Diels Alder adduct, a hetero Diels Alder adduct, an aromatic substitution reaction product, a nucleophilic substitution reaction product, an ester, an amide, a carbamate, an ether, a thioether, or a Michael reaction product. The linker may be a cycloaddition product, a metathesis reaction product, a metal-mediated cross-coupling reaction product, a radical polymerization product, an oxidative coupling product, an acyl-transfer reaction product, or a photo click reaction product. The cycloaddition may be a Huisgen-cycloaddition. The cycloaddition may be a copper-free [3+2] Huisgen-cycloaddition. The cycloaddition may be a Diels-Alder reaction. The cycloaddition may be a hetero Diels-Alder reaction. The linker may be the product of an enzyme-mediated reaction. The linker may be a product of a transglutaminase-mediated reaction, non-limiting examples of which are described in Lin et al., J. Am. Chem. Soc. 128:4542-4543 (2006) and WO 2013/093809. The linker may comprise a disulfide bridge that connects two cysteine residues, such as ThioBridge™ technology by PolyTherics. The linker may comprise a maleimide bridge that connects two amino acid residues. The linker may comprise a maleimide bridge that connects two cysteine residues.

[0246] Two or more linkers may be linked. The two or more linkers may be linked through one or more copper-free reactions. The two or more linkers may be linked through one or more cycloadditions. The two or more linkers may be linked through one or more Huisgen-cycloadditions. The two or more linkers may be linked through one or more copper-free [3+2] Huisgen-cycloadditions. The two or more linkers may be linked through one or more copper-containing reactions. The two or more linkers may be linked through one or more Diels Alder reactions. The two or more linkers may be linked through one or more hetero Diels Alder reactions.

[0247] Humanized CAR-EC switches may be optimized as disclosed in PCT/US2016/027997 and PCT/US2016/027990, each of which is incorporated herein by reference in its entirety. For example, humanized CAR-EC switches may be optimized by adjusting linker length. humanized CAR-EC switches may comprise linkers of different lengths. Linkers may be relatively short. Linkers may be relatively long. The one or more linkers may be between about 1 angstroms (Å) to about 120 Å in length. The one or more linkers may be between about 5 Å to about 105 Å in length. The one or more linkers may be between about 10 Å to about 100 Å in length. The one or more linkers may be between about 10 Å to about 90 Å in length. The one or more linkers may be between about 10 Å to about 80 Å in length. The one or more linkers may be between about 10 Å to about 70 Å in length. The one or more linkers may be between about 15 Å to about 45 Å in length. The one or more linkers may be equal to or greater than about 4, 5, 6, 7, 8, 9, 10, 11, 12, 13, 14, 15, 16, 17, 18, 19, 20, 25, 27, 30 or more angstroms in length. The one or more linkers may be equal to or greater than about 10 Å in length. The one or more linkers may be equal to or greater than about 15 angstroms in Å. The one or more linkers may be equal to or greater than about 20 Å in length. The one or more linkers may be equal to or less than about 110, 100, 90, 85, 80, 75, 70, 65, 60, 55, 50, 45, 43, 42, 41, 40, 39, 38, 37, 36, 35, 34, 33, 32, 31, 30 or fewer Å in length. The one or more linkers may be equal to or less than about 100 Å in length. The one or more linkers may be equal to or less than about 80 Å in length. The one or more linkers may be equal to or less than about 60 Å in length. The one or more linkers may be equal to or less than about 40 Å in length.

[0248] The total length of the linkers may be between about 1 Å to about 120 Å. The total length of the linkers may be between about 5 Å to about 105 Å. The total length of the linkers may be between about 10 Å to about 100 Å. The total length of the linkers may be between about 10 Å to about 90 Å. The total length of the linkers may be between about 10 Å to about 80 Å. The total length of the linkers may be between about 10 Å to about 70 Å. The total length of the linkers may be between about 15 Å to about 45 Å. The total length of the linkers may be equal to or greater than about 4, 5, 6, 7, 8, 9, 10, 11, 12, 13, 14, 15, 16, 17, 18, 19, 20, 25, 27, 30 or more Å. The total length of the linkers may be equal to or greater than about 10 Å. The total length of the linkers may be equal to or greater than about 15 Å. The total length of the linkers may be equal to or greater than about 20 Å. The total length of the linkers may be equal to or less than about 110, 100, 90, 85, 80, 75, 70, 65, 60, 55, 50, 45, 43, 42, 41, 40, 39, 38, 37, 36, 35, 34, 33, 32, 31, 30 or fewer Å. The total length of the linkers may be equal to or less than about 100 Å. The total length of the linkers may be equal to or less than about 80 Å. The total length of the linkers may be equal to or less than about 60 Å. The total length of the linkers may be equal to or less than about 40 Å. The total length of the linkers may be equal to or less than about 25 Å. The distance between the CAR-ID and the targeting moiety may be about 30 Å.

### Grafted/Fused Switches

[0249] Disclosed herein are switches, wherein the CAR-ID is grafted or fused to the targeting moiety. The CAR-ID may comprise a non-antibody protein or a non-antibody peptide and the targeting moiety may bind to a cell surface molecule on a target. The cell surface molecule may comprise an antigen. The targeting moiety may be a targeting polypeptide. The targeting polypeptide may be a targeting antibody or antibody fragment. The antibody fragment may be an antigen binding portion of an antibody. The targeting antibody or antibody fragment may be an immunoglobulin (Ig). The immunoglobulin may be selected from an IgG, an IgA, an IgD, an IgE, an IgM, a fragment thereof or a modification thereof. The targeting antibody may bind a target on the cell surface of a target cell. In some embodiments, the target may be selected from CD19, Her2, CLL1, CD33, CD123, EGFR, EGFRvIII, CD20, CD22, CS1, BCMA, and CEA. In some embodiments, the disclosure presents a humanized targeting moiety grafted with the CAR-ID. In some embodiments, the targeting moiety is an anti-CD19 targeting antibody or a CD19-binding fragment there. In some embodiments, the targeting moiety is a humanized anti-CD19 targeting antibody or a CD19-binding fragment thereof. The targeting antibody or antibody fragment may be selected from an immunoglobulin, a Fab, a Fab′, a F(ab′)2 and an scFv. The targeting antibody or antibody fragment may comprise a light chain. The targeting antibody or antibody fragment may comprise a heavy chain.

[0250] The CAR-ID may be grafted into the targeting moiety (e.g., between chosen amino acids of the targeting antibody or antibody fragment). The CAR-ID may be fused to a terminus of the targeting antibody or antibody fragment. Alternatively, the targeting antibody or antibody fragment may be grafted into or fused to the CAR-ID.

[0251] The CAR-ID may be fused to an N terminus of the light chain of the targeting antibody or antibody fragment. The CAR-ID may be fused to a C terminus of the light chain of the targeting antibody or antibody fragment. The CAR-ID may be fused to an N terminus of the heavy chain of the targeting antibody or antibody fragment. The CAR-ID may be fused to a C terminus of the heavy chain of the targeting antibody or antibody fragment. The CAR-ID may be fused to an N terminus of a VL domain of the targeting antibody or antibody fragment. The CAR-ID may be fused to an N terminus of a VH domain of the targeting antibody or antibody fragment. The CAR-ID may be fused to a C terminus of a CL domain of the targeting antibody or antibody fragment. The CAR-ID may be fused to a C terminus of an Fc domain of the targeting antibody or antibody fragment. The CAR-ID may be fused to an N terminus of a VL domain of an IgG. The CAR-ID may be fused to an N terminus of a VH domain of an IgG. The CAR-ID may be fused to a C terminus of a CL domain of an IgG. The CAR-ID may be fused to a C terminus of an Fc domain of an IgG. The CAR-ID may be fused to an N terminus of a VL domain of a Fab. The CAR-ID may be fused to an N terminus of a VH domain of a Fab. The CAR-ID may be fused to a C terminus of a CL domain of a Fab. The CAR-ID may be fused to a C terminus of a CH₁ domain of the Fab.

[0252] The CAR-ID may be grafted into an internal site of the targeting moiety (e.g., an anti-CD19 targeting antibody or CD19-binding antibody fragment (e.g., between chosen amino acids of the targeting antibody or antibody fragment)). The CAR-ID may be grafted into a heavy chain of a targeting antibody or antibody fragment. The CAR-ID may be grafted into a light chain of a targeting antibody or antibody fragment. The CAR-ID may be grafted into a constant domain/region of a targeting antibody or antibody fragment. The CAR-ID may be grafted into a variable domain/region of a targeting antibody or antibody fragment. The CAR-ID may be grafted into an internal site of a Fab. The CAR-ID may be grafted into an internal site of an immunoglobulin (e.g., IgG). The CAR-ID may be grafted into a domain of the targeting antibody or fragment thereof selected from a CL domain, a CH₁ domain, a CH2 domain, a CH3 domain, a VL domain, a VH domain and a hinge domain. The CAR-ID may be grafted between two domains of the antibody or fragment thereof selected from a CL domain, a CH₁ domain, a CH₂ domain, a CH₃ domain, a VL domain, a VH domain and a hinge domain, wherein the two domains are adjacent. The CAR-ID may be grafted into a CL domain of the antibody or fragment thereof. The CAR-ID may be grafted into a CH₁ domain of the antibody or fragment thereof. The CAR-ID may be grafted into a hinge domain of the antibody or fragment thereof. The CAR-ID may be grafted into a loop of the antibody or fragment thereof. The CAR-ID may be grafted into a CL domain loop of the antibody or fragment thereof.

[0253] The CAR-ID may be grafted into the C terminus of the targeting moiety (e.g., a humanized anti-CD19 targeting antibody or CD19-binding antibody fragment) and therefore the distance between the chimeric receptor and the target may differ substantially depending on the size of chimeric receptor-EC switch (approximately 40 Å for scFv, 70 Å for Fab, and 120 Å for IgG). While a larger distance may negatively impact efficacy in vitro, the increased residence time of the full length antibody may be superior in vivo.

### Multivalent Switches

[0254] Exemplified herein are switches comprising a CAR-ID and a humanized CD19-binding targeting moiety. Also exemplified herein are switches comprising a GCN4 peptide derivative and a targeting moiety (e.g., a CD19 targeting moiety). However, one skilled in the art will understand from the disclosure that the switches disclosed herein further comprise additional or alternative targeting moieties and/or additional or alternative CAR-IDs. One or more CAR-IDs may be grafted into one or more grafting sites of the targeting moiety, and vice versa. One or more CAR-IDs may be fused to one or more termini of the targeting moiety, and vice versa. One or more CAR-IDs may be conjugated to one or more termini of the targeting moiety, and vice versa. This may be advantageous, as several grafting/fusing sites may be predicted to provide optimal binding of the CAR-ID to the chimeric receptor. For example, a first CAR-ID may be grafted into a first domain of the targeting moiety and a second CAR-ID may be grafted into a second domain of the targeting moiety. The first domain and the second domain may be the same. The first domain and the second domain may be different. By way of non-limiting example, the first CAR-ID may be grafted into a light chain of a targeting antibody or antibody fragment and a second CAR-ID may be grafted into heavy chain of the targeting antibody or antibody fragment. The first CAR-ID may be fused to a first terminus of the targeting polypeptide and a second CAR-ID may be fused to a second terminus of the targeting polypeptide. By way of non-limiting example, the first CAR-ID may be fused to a C terminus of a light chain of a targeting antibody or antibody fragment and a second CAR-ID may be fused to an N terminus of a heavy chain of the targeting antibody or antibody fragment. The first CAR-ID may be fused to a terminus of the targeting polypeptide and a second CAR-ID may be grafted within a domain of the targeting polypeptide. The first CAR-ID and the second CAR-ID may be the same or similar, such that the switch may be used with an effector cell that expresses one chimeric receptor. The first CAR-ID and the second CAR-ID may be different, such that the switch may be used with an effector cell that expresses one or more chimeric receptors or multiple effector cells that express different chimeric receptors.

[0255] The switches disclosed herein may comprise one or more CAR-IDs. The switches disclosed herein may comprise two or more CAR-IDs. The switches disclosed herein may comprise three or more CAR-IDs. The switches disclosed herein may comprise 1, 2, 3, 4, 5, 6, 7 or more CAR-IDs. The one or more CAR-IDs may be fused or grafted to the targeting moiety via one or more linkers. Thus, the switches disclosed herein may comprise one or more linkers. The switches disclosed herein may comprise two or more linkers. The switches disclosed herein may comprise three or more linkers. The switches disclosed herein may comprise 1, 2, 3, 4, 5, 6, 7 or more linkers.

### II. CAR-EC Switch Production Methods

[0256] Disclosed herein are methods of producing humanized CAR-EC switches.

[0257] In some embodiments, the methods comprise expressing one or more polypeptides from one or more vectors comprising one or more polynucleotide having one or more sequences that encode a chimeric antigen receptor-effector cell switch or a portion thereof, wherein the chimeric antigen receptor-effector cell switch comprises a CAR-ID and an anti-target targeting moiety.

[0258] In some embodiments, the methods comprise expressing one or more polypeptides from one or more vectors comprising one or more polynucleotide having one or more sequences that encode a chimeric antigen receptor-effector cell switch or a portion thereof, wherein the chimeric antigen receptor-effector cell switch comprises a CAR-ID and a humanized anti-CD19 targeting moiety.

[0259] In some embodiments, the methods comprise expressing one or more polypeptides from one or more vectors comprising one or more polynucleotide having one or more sequences that encode a chimeric antigen receptor-effector cell switch or a portion thereof, wherein the chimeric antigen receptor-effector cell switch comprises a GCN4 peptide derivative disclosed herein and a targeting moiety. In some embodiments, the targeting moiety is humanized. In some embodiments, the targeting moiety targets CD19. In some particular embodiments, the targeting moiety is a humanized anti-CD19 targeting moiety.

[0260] The targeting moiety may comprise a targeting polypeptide (e.g., a humanized anti-CD19 antibody or a CD19-binding fragment of a humanized anti-CD19 antibody). In general, such methods comprise fusing or grafting a polynucleotide encoding the CAR-ID to a polynucleotide encoding a targeting moiety (e.g., a humanized anti-CD19 polypeptide targeting moiety (targeting polypeptide)). Fusing or grafting may be carried out by any standard cloning method known to one skilled in the art. Fusing or grafting the polynucleotides encoding the CAR-ID (e.g., a GCN4 peptide derivative) and targeting polypeptide (e.g., an antibody such as a CD19 antibody or an antigen binding portion thereof) may comprise enzymatic digestion of the polynucleotides, ligation of the polynucleotides and/or amplification of the polynucleotides.

[0261] The CAR-ID may be fused to an N terminus of the targeting polypeptide. The CAR-ID may be fused to a C terminus of the targeting polypeptide. The CAR-ID may be grafted within the targeting polypeptide. The targeting polypeptide may comprise a targeting antibody or antibody fragment. The CAR-ID may be fused to an N terminus of the targeting antibody or antibody fragment. The CAR-ID may be fused to a C terminus of the targeting antibody or antibody fragment.

[0262] In some embodiments, the design of the switch (e.g., grafting position of the CAR-ID on a targeting moiety, length of a linker connecting the CAR-ID to the targeting moiety, etc.) is critical to the cytotoxicity, activation, and cytokine release of the peptide switchable CAR-EC cells. The switch grafting position may be empirically designed for the target based on the epitope location of an anti-target antibody (targeting moiety) on the target in order to find an optimal distance and geometry (immunological synapse) between the CAR-EC and the target cell. For example, in some embodiments, for antibodies that bind to CD19 epitopes that are far from the membrane (membrane distal), switch designs that provide an overall short immunological synapse through the use of an N-terminal fusion of the CAR-ID on an anti-CD19 targeting moiety (e.g., an anti-CD19 antibody or antigen binding portion thereof, such as any one of the humanized anti_CD19 antibodies disclosed herein) may improve the activity (FIG. 15 (middle)). Designs which provide too much distance between the CAR-EC and target cell through the use of a C-terminal fusion may result in suboptimal activity (FIG. 15 (left)). The CAR may also be modified to shorten the hinge region. This may bring the CAR-T cell and target cell closer together (FIG. 15 (right)) which is further advantageous. Also, by way of a non-limiting example, for antibodies that bind to epitopes of CD19 that are close the membrane (membrane proximal), switch designs that provides sufficient distance (through the use of a C-terminal fusion) for the immunological synapse to form are optimal (FIG. 16 (middle)). Designs which do not provide enough distance between the CAR-EC and the target cell through the use of N-terminal fusions may result in suboptimal or no activity due to steric hindrance (FIG. 16 (right)). Designs which provide too much distance between the CAR-EC and target cell (through a longer hinge region) may result in suboptimal activity (FIG. 16 (left)).

[0263] As will be clear to one skilled in the art, the sequences disclosed herein may include leader peptides (or “leader sequence”, interchangeably), which will be cleaved during polypeptide expression if expression is in a cell comprising a secretory pathway. The location of the leader peptide is at the N-terminus of the protein, and the leader sequences are readily apparent to one skilled in the art and can be easily identified using, e.g., the SignalP server (available at the world wide web address: cbs.dtu.dk/services/SignalP/, incorporated herein by reference in its entirety). In one non-limiting embodiment, the leader peptide may comprise or consist of the kappa leader sequence (e.g., SEQ ID NO: 246).

[0264] The CAR-ID may be fused to the terminus of the targeting polypeptide without replacing or removing any amino acids of the targeting polypeptide. Fusing the CAR-ID to the terminus of the targeting polypeptide may comprise removing or replacing amino acids at the terminus of the targeting polypeptide. Removing or replacing amino acids at the terminus of the targeting polypeptide may comprise removing or replacing about 1 to about 20 amino acids at the terminus of the targeting polypeptide. The CAR-ID may be fused to the terminus of the targeting polypeptide via a linker. The linker may be fused to the CAR-ID to produce a CAR-ID-linker intermediate. The linker may be fused to a CAR-ID N terminus to produce the CAR-ID-linker intermediate. The linker may be fused to a CAR-ID C terminus to produce the CAR-ID-linker intermediate. The CAR-ID-linker intermediate may be fused to the targeting polypeptide. The CAR-ID-linker intermediate may be fused to the N terminus of the targeting polypeptide. The CAR-ID-linker intermediate may be fused to the C terminus of the targeting polypeptide. A first CAR-ID linker intermediate may be fused to the N terminus of the targeting polypeptide and a second CAR-ID linker intermediate may be fused to the C terminus of the targeting polypeptide. The CAR-ID of the first CAR-ID linker intermediate may be the same or similar to the CAR-ID of the second CAR-ID linker intermediate. The CAR-ID of the first CAR-ID linker intermediate may be different from the CAR-ID of the second CAR-ID linker intermediate.

[0265] As used herein, light chain grafts on the N-terminus may be referred to as LCNT. Light chain grafts on the C-terminus may be referred to as LCCT. Light chain grafts in the C1 domain may be referred to as LCC1. Heavy chain grafts on the N-terminus may be referred to as HCNT. Heavy chain grafts on the C-terminus may be referred to as HCCT. Heavy chain grafts in the C1 domain may be referred to as HCC1. Switches expressed with N-terminal grafts on the light and heavy chain may be referred to as NTBV. Switches expressed with C-terminal grafts on the light and heavy chain may be referred to as CTBV. Switches expressed with grafts in the C1 domain of the light and heavy chain may be referred to as C1BV.

[0266] As used herein, the term “grafted” may refer to inserting a CAR-ID within a targeting polypeptide (e.g., between two amino acids of the targeting polypeptide). The CAR-ID may be grafted within the targeting polypeptide without replacing or removing any amino acids of the targeting polypeptide. Grafting the CAR-ID within the targeting polypeptide may comprise removing or replacing amino acids within the targeting polypeptide. Removing or replacing amino acids within the targeting polypeptide may comprise removing or replacing about 1 to about 20 amino acids within the targeting polypeptide. The CAR-ID may be grafted within the targeting polypeptide via one linker. The CAR-ID may be grafted within the targeting polypeptide via two linkers. The linker may be fused to the CAR-ID N terminus to produce a CAR-ID-linker intermediate. The linker may be fused to the CAR-ID C terminus to produce a CAR-ID-linker intermediate. A first linker may be fused to the CAR-ID N terminus and a second linker may be fused to the CAR-ID C terminus to produce a CAR-ID-linker intermediate. The CAR-ID linker intermediate may be grafted with in the targeting polypeptide. A first CAR-ID linker intermediate may be grafted within the targeting polypeptide and a second CAR-ID linker intermediate may be grafted within the targeting polypeptide. The first CAR-ID linker intermediate may be grafted within a first domain of the targeting polypeptide and a second CAR-ID linker intermediate may be grafted within a second domain of the targeting polypeptide. The first domain of the targeting polypeptide may be the same as the second domain of the targeting polypeptide. The first domain of the targeting polypeptide may be different from the second domain of the targeting polypeptide. The CAR-ID of the first CAR-ID linker intermediate may be the same or similar to the CAR-ID of the second CAR-ID linker intermediate. The CAR-ID of the first CAR-ID linker intermediate may be different from the CAR-ID of the second CAR-ID linker intermediate. Unless otherwise specified, the terms “graft” and “insert”, as used herein, are used interchangeably.

[0267] The targeting moiety may bind to a target on the cell surface of a target cell. In some embodiments, the targeting moiety may comprise a humanized anti-CD19 antibody or a CD19 binding fragment thereof (e.g., any one or more of the humanized anti-CD19 antibodies or fragments thereof disclosed herein). The antibody or antibody fragment may comprise a heavy chain and a light chain or fragments thereof. The methods may comprise expressing a heavy chain wherein the CAR-ID is fused to a terminus of the heavy chain. The methods may comprise expressing a heavy chain wherein the CAR-ID is grafted within the heavy chain. The methods may comprise expressing a light chain wherein the CAR-ID is fused to a terminus of the light chain. The methods may comprise expressing a light chain wherein the CAR-ID is grafted within the light chain.

[0268] The methods may further comprise cloning one or more polynucleotides encoding the targeting polypeptide and/or the CAR-ID into an expression vector. The methods may further comprise ligation of the one or more polynucleotides encoding the targeting polypeptide and/or CAR-ID into an expression vector. The expression vector may be a prokaryotic expression vector. The expression vector may be a eukaryotic expression vector. The expression vector may be a mammalian expression vector. The expression vector may be a viral expression vector. The expression vector may be a pFUSE vector. The methods may further comprise validating the cloning of the one or more polynucleotides encoding the targeting polypeptide and/or CAR-ID into the expression vector comprising sequencing the expression vector, running gel electrophoresis of the vector and/or viewing the targeting polypeptide and/or CAR-ID on an SDS page gel.

[0269] The methods may further comprise amplifying a polynucleotide encoding the targeting polypeptide and/or CAR-ID and cloning the targeting polypeptide and/or CAR-ID into the expression vector. Amplifying the polynucleotide encoding the targeting polypeptide and/or the CAR-ID may comprise synthesizing oligonucleotides at least partially complementary to the gene. The oligonucleotides may be sufficiently complementary to the gene to anneal to the polynucleotide. The oligonucleotides may comprise linker sequences. Many suitable linkers are known in the art and are suitable for use in the present invention. In some embodiments, the linker is a linker disclosed herein. In some embodiments, the linker sequences may be selected from SEQ ID NOs: 93-103, 116-137, and 164-168.

[0270] The methods may comprise transfecting or infecting a cell with the expression vector. The methods may further comprise expressing the targeting polypeptide and/or CAR-ID in the cell. The methods may further comprise expressing the targeting polypeptide and/or CAR-ID in a cell free system. The methods may further comprise producing a virus comprising the expression vector. The methods may further comprise propagating the virus. The methods may further comprise infecting a cell with the virus comprising the expression vector. The methods may further comprise propagating the cell.

[0271] The switch may be expressed as two vectors, one of the heavy chain of the antibody and one for the light chain of the antibody. The two vectors may be co-transfected into an expression cell. The expression cell may be selected from a prokaryotic cell and a eukaryotic cell. The expression cell may be selected from a HEK cell and a CHO cell. Expression may be carried out in HEK cells over 7 or more days with routine harvesting of media to collect and isolate the antibody switch of interest. Expression may be carried out in less than 7 days. The switch may also be expressed from CHO cells in analogous fashion using the same plasmids. The media may or may not be harvested at intervals or may be harvested at the end of the expression. Harvesting at intervals may be preferable to preventing proteolytic degradation of the switch.

[0272] The switch may be expressed in E. coli. The switch may be expressed in E. coli from a vector, such as the pBAD vector, by way of non-limiting example. The pBAD vector may harbor both the light chain and the heavy chain of the antibody. This may require transformation of E. coli with only one plasmid. This may be advantageous as expression in E. coli is generally less expensive and faster than expression in mammalian cells (e.g., HEK cells). In some embodiments, switches expressed in E. coli. may comprise modified CAR-IDs and/or modified targeting moieties in which dilysine motifs are eliminated to avoid cleave of the peptide by OmpT proetease. In some embodiments, to express the switch in E. coli, careful attention is paid to the genotype of the strain used. In some embodiments, preferable genotypes include, but are not limited to, those with the ompT gene (an outer membrane protein protease VII which may proteolyze the expressed protein) disrupted. This includes BL21 (E. coli B F- dcm ompT hsdS(rB−mB−) gal [malB+]K-12(λS)), OverExpress(tm)C41(DE3) (Lucigen) (F- ompT gal dcm hsdSB(rB−mB−)(DE3)), and others. The non-preferable strains for expression include DH10B (F- endA1 recA1 galE15 galK16 nupG rpsL ΔlacX74 Φ80lacZAM15 araD139 Δ(ara,leu)7697 mcrA Δ(mrr-hsdRMS-mcrBC)) λ−), DH5alpha (F- endA1 glnV44 thi-1 recA1 relA1 gyrA96 deoR nupG Φ80dlacZΔM15 Δ(lacZYA-argF)U169, hsdR17(rK−mK+), λ−) or other strains which do not include the ompT knockout. Strains such as DH10B and DH5alpha may be made preferable by disruption of the ompT gene. Disclosed herein are methods of grafting the antibody or antibody fragment, the CAR-ID or the targeting peptide to produce a CAR-EC switch. The method may comprise grafting the CAR-ID to the antibody or antibody fragment. The method may comprise grafting the CAR-ID to an N terminus, C terminus or internal site of the antibody or antibody fragment. The CAR-ID may be grafted to a CL domain of the antibody or antibody fragment. The CAR-ID may be grafted to a loop of the CL domain of the antibody or antibody fragment. The method may comprise grafting the antibody or antibody fragment to the CAR-ID. The method may comprise grafting the antibody or antibody fragment to an N terminus, C terminus or internal site of the CAR-ID. The method may comprise grafting the CAR-ID to the targeting peptide. The method may comprise grafting the CAR-ID to an N terminus, C terminus or internal site of the targeting peptide. The method may comprise grafting the targeting peptide to the CAR-ID. The method may comprise grafting the targeting peptide to an N terminus, C terminus or internal site of the CAR-ID.

[0273] The CAR-ID, targeting peptide, antibody or antibody fragment may comprise one or more linkers, wherein the linker is located at the N terminus and/or C terminus of the CAR-ID, targeting peptide, antibody or antibody fragment. The method may comprise grafting the antibody or antibody fragment, the CAR-ID or the targeting peptide through the linker. The linker may comprise (GSSSS)ₙ. The linker may comprise a sequence selected from SEQ ID NOs: 93-103, 116-137, and 164-168. The linker may comprise a sequence that is at least about 50% identical to a sequence selected from SEQ ID NOs: 93-103, 116-137, and 164-168. The linker may comprise a sequence selected from SEQ ID NOs: 93-103, 116-137, and 164-168.

[0274] Grafting may comprise producing a CAR-EC switch encoding nucleic acid. Producing the CAR-EC switch encoding nucleic acid may comprise one or more polymerase chain reactions. Producing the CAR-EC switch encoding nucleic acid may comprise one or more nucleic acid enzymatic digestions. The enzymatic digestion may be site-specific. Producing the CAR-EC switch encoding nucleic acid may comprise one or more ligations. The methods of producing the CAR-EC switch may comprise incorporating the CAR-EC switch encoding nucleic acid into a CAR-EC switch vector. The vector may be an expression vector. The expression vector may comprise a constitutive promoter, an inducible promoter and/or a conditional promoter. The CAR-EC switch encoding nucleic acid or CAR-EC switch vector may be expressed in a cell and the resulting CAR-EC switch isolated and purified. The cell may be a prokaryotic cell. The cell may be an E. coli. The cell may be a eukaryotic cell. The cell may be a mammalian cell. The CAR-EC switch encoding nucleic acid or CAR-EC switch vector may be expressed in a cell-free system. Alternatively or additionally the CAR-EC switch may be synthesized from free amino acids.

[0275] In some embodiments, the method comprises attaching a CAR-ID to a targeting moiety. In some embodiments, the method may comprise attaching a switch intermediate comprising a CAR-ID and a linker to a targeting moiety. The method may comprise attaching a switch intermediate comprising a targeting moiety and a linker to a CAR-ID. The method may comprise attaching a first switch intermediate comprising a CAR-ID and a first linker to a second switch comprising a targeting moiety and a second linker. Attachment of the CAR-ID to the targeting moiety may occur in a site-specific manner. Attachment in a site-specific manner may comprise attaching the CAR-ID to a predetermined site on the targeting moiety.

[0276] Attachment in a site-specific manner may comprise attaching the targeting moiety to a predetermined site on the CAR-ID. Attachment of the CAR-ID to the targeting moiety may occur in a site-independent manner. Attachment in a site-independent manner may comprise attaching the CAR-ID to a random site on the targeting moiety. Attachment in a site-independent manner may comprise attaching the targeting moiety to a random site on the CAR-ID. The method may further comprise attaching one or more additional CAR-IDs to the targeting moiety. The method may further comprise attaching or more additional targeting moieties to the CAR-ID. The method may further comprise using one or more additional linkers to connect the targeting moiety to the CAR-ID. Attaching the CAR-ID to the targeting moiety may comprise conducting one or more chemical reactions.

[0277] The method of producing a switch may comprise linking a targeting moiety based on or derived from an antibody or antibody fragment to a CAR-ID or a switch intermediate comprising a CAR-ID to produce a CAR-EC switch comprising (a) the targeting moiety; (b) one or more linkers; and (c) the CAR-ID, the one or more linkers may link the targeting moiety to the CAR-ID. Linking the targeting moiety to the CAR-ID may occur in a site-specific manner. The CAR-ID may be attached to a predetermined site on the targeting moiety via the one or more linkers. The targeting moiety may be attached to a predetermined site on the CAR-ID via the one or more linkers.

[0278] The CAR-EC switches disclosed herein may comprise one or more unnatural amino acids. The one or more CAR-IDs may comprise one or more unnatural amino acids. The one or more targeting moieties may comprise one or more unnatural amino acids. The one or more linkers may comprise one or more unnatural amino acids. Attachment of the CAR-ID to the targeting moiety may occur via the one or more unnatural amino acids. The one or more linkers may link the one or more CAR-IDs to the one or more targeting moieties site-specifically through the one or more unnatural amino acids. Alternatively, or additionally, the one or more linkers may link the one or more targeting moieties to the one or more targeting moieties site-specifically, wherein an unnatural amino acid is not required to link the one or more targeting moieties to the one or more targeting moieties. The targeting moiety may be linked to 1, 2, 3, 4, 5 or more unnatural amino acids on the targeting moiety. The targeting moiety may be linked to 1, 2, 3, 4, 5 or more unnatural amino acids on the targeting moiety site-specifically. Alternatively, the targeting moiety may be linked to 1, 2, 3, 4, 5 or more unnatural amino acids on the targeting moiety. The targeting moiety may be linked to 1, 2, 3, 4, 5 or more unnatural amino acids on the targeting moiety site-specifically.

[0279] The CAR-ID may comprise one or more unnatural amino acids. The CAR-IDs disclosed herein may comprise 1, 2, 3, 4, 5, 6, 7, 8, 9, 10 or more unnatural amino acids. The targeting moiety may comprise one or more unnatural amino acids. The targeting antibodies or antibody fragments disclosed herein may comprise 2, 3, 4, 5, 6, 7, 8, 9, 10 or more unnatural amino acids. The unnatural amino acid may react with the linker to create a chemical bond.

[0280] The one or more unnatural amino acids may be inserted between two naturally occurring amino acids in the targeting moiety. The one or more unnatural amino acids may replace one or more naturally occurring amino acids in the targeting moiety. The one or more unnatural amino acids may be incorporated at the N terminus of the targeting moiety. The one or more unnatural amino acids may be incorporated at the C terminus of the targeting moiety. The one or more unnatural amino acids maybe incorporated at an internal site of the targeting moiety. The unnatural amino acid may be incorporated distal to the region of the targeting moiety that interacts with a molecule on or from a target. The unnatural amino acid may be incorporated proximal to the region of the targeting moiety that interacts with a molecule on or from a target. The unnatural amino acid may be incorporated at a site intermediate to the region of the targeting moiety that interacts with a molecule on or from a target. The unnatural amino acid may be incorporated in the region of the targeting moiety that interacts with a molecule on or from a target.

[0281] The one or more unnatural amino acids may replace one or more amino acids in the targeting moiety. The one or more unnatural amino acids may replace any natural amino acid in the targeting moiety.

[0282] The one or more unnatural amino acids may be incorporated in a light chain of the immunoglobulin from which the targeting moiety is based or derived. The one or more unnatural amino acids may be incorporated in a heavy chain of the immunoglobulin from which the targeting moiety is based or derived. The one or more unnatural amino acids may be incorporated in a heavy chain and a light chain of the immunoglobulin from which the targeting moiety is based or derived. The one or more unnatural amino acids may replace an amino acid in the light chain of the immunoglobulin from which the targeting moiety is based or derived. The one or more unnatural amino acids may replace an amino acid in a heavy chain of the immunoglobulin from which the targeting moiety is based or derived. The one or more unnatural amino acids may replace an amino acid in a heavy chain and a light chain of the immunoglobulin from which the targeting moiety is based or derived.

[0283] The one or more unnatural amino acids may replace a glycine of a light chain of the immunoglobulin from which the targeting moiety is based or derived. The one or more unnatural amino acids may replace an arginine of a light chain of the immunoglobulin from which the targeting moiety is based or derived. The one or more unnatural amino acids may replace a serine of a light chain of the immunoglobulin from which the targeting moiety is based or derived. The one or more unnatural amino acids may replace a threonine of a light chain of the immunoglobulin from which the targeting moiety is based or derived. The one or more unnatural amino acids may replace an alanine of a light chain of the immunoglobulin from which the targeting moiety is based or derived. The one or more unnatural amino acids may replace an alanine of a heavy chain of the immunoglobulin from which the targeting moiety is based or derived. The one or more unnatural amino acids may replace a serine of a heavy chain of the immunoglobulin from which the targeting moiety is based or derived. The one or more unnatural amino acids may replace a lysine of a heavy chain of the immunoglobulin from which the targeting moiety is based or derived. The one or more unnatural amino acids may replace a proline of a heavy chain of the immunoglobulin from which the targeting moiety is based or derived.

[0284] In some embodiments, the one or more unnatural amino acids may replace an amino acid of the targeting moiety, wherein the targeting moiety is a humanized anti-CD19 antibody or a CD19-binding fragment thereof. The one or more unnatural amino acids may replace a glycine of a light chain of the anti-CD19 antibody or fragment thereof. The one or more unnatural amino acids may replace a threonine of a light chain of the anti-CD19 antibody or fragment thereof. The one or more unnatural amino acids may replace a serine of a light chain of the anti-CD19 antibody or fragment thereof. The one or more unnatural amino acids may replace a serine of a heavy chain of the anti-CD19 antibody or fragment thereof. The one or more unnatural amino acids may replace an alanine of a heavy chain of the anti-CD19 antibody or fragment thereof. The one or more unnatural amino acids may replace a lysine of a heavy chain of the anti-CD19 antibody or fragment thereof. The antibody or antibody fragment may be an anti-CD19 antibody or fragment thereof, wherein the one or more unnatural amino acids may replace one or more amino acids of a light chain of the anti-CD19 antibody or fragment thereof. The light chain of the anti-CD19 antibody or CD19-binding portion thereof may comprise one of SEQ ID NOS: 17-25; 27-35. The one or more unnatural amino acids may replace one or more amino acids of one of SEQ ID NOS: 17-25; 27-35. In some embodiments, the one or more amino acids of one of SEQ ID NOS: 17-25; 27-35 may be selected from G68 and K107. The one or more unnatural amino acids may replace one or more amino acids of a heavy chain of the anti-CD19 antibody or fragment thereof. The heavy chain of the anti-CD19 antibody or fragment thereof may comprise one of SEQ ID NOS: 2-15. The one or more unnatural amino acids may replace one or more amino acids of one of SEQ ID NOS: 2-15. The one or more amino acids of one of SEQ ID NOS: 2-15 may be S74.

[0285] Disclosed herein are methods of producing a switch of Formula I: X-L1-Y or Formula IA: Y-L1-X, wherein X is a CAR-ID, Y is a targeting moiety and L1 is a linker. X may be a CAR-binding small molecule and Y may be an antibody or antibody fragment. X may be a CAR-binding small molecule that does not comprise a peptide and Y may be a peptide that does not comprise an antibody or antibody fragment. X may be a CAR-binding small molecule that does not comprise a peptide and Y may be a targeting small molecule that does not comprise a peptide. The method may comprise conducting one or more reactions to attach the CAR-ID to a predetermined site in the targeting moiety. Conducting the one or more reactions to attach the CAR-ID to the targeting moiety may comprise mixing a plurality of CAR-IDs with a plurality of targeting moieties. The method may comprise attaching one end of the linker to the targeting moiety, followed by attachment of the other end of the linker to the CAR-ID. The method may comprise attaching one end of the linker to the CAR-ID, followed by attachment of the other end of the linker to the targeting moiety. Attachment of the linker to the targeting moiety may occur in a site-specific manner. The linker may be attached to a predetermined amino acid of the targeting moiety. The amino acid may be an unnatural amino acid. The linker may comprise a functional group that interacts with the amino acid. Attachment of the linker to the targeting moiety may occur in a site-independent manner. The linker may be randomly attached to the targeting moiety. The linker may comprise a functional group that reacts with a functional group in the targeting moiety. Attachment of the linker to the CAR-ID may occur in a site-specific manner. Attachment of the linker to the CAR-ID may occur in a site-independent manner. The linker may comprise a functional group that reacts with a functional group in the CAR-ID. Conducting the one or more reactions to attach the CAR-ID to the targeting moiety may comprise conducting an oxime ligation.

[0286] Alternatively, or additionally, the method may comprise conducting a reaction to attach the linker or a precursor of the linker to the CAR-ID to produce a switch intermediate comprising the linker conjugated to the CAR-ID. The switch intermediate may have the Formula II: X-L1 or Formula IIA: L1-X, wherein X is the CAR-ID and L1 is the linker or precursor of the linker. The linker may be conjugated to the CAR-ID in a site-specific manner. The linker may be conjugated to the CAR-ID in a site-independent manner. Conducting the one or more reactions to attach the CAR-ID to the targeting moiety may comprise attaching the linker portion of the switch intermediate to the targeting moiety. Conducting the one or more reactions to attach the CAR-ID to the targeting moiety may comprise contacting a plurality of switch intermediates comprising the linker or linker precursor conjugated to the CAR-ID with a plurality of targeting moieties. Attachment of the linker portion of the switch intermediate to the targeting moiety may occur in a site-specific manner. The targeting moiety may comprise one or more unnatural amino acids. The linker portion of the switch may be attached to the targeting moiety via the one or more unnatural amino acids. Attachment of the linker portion of the switch intermediate may occur in a site-independent manner.

[0287] Alternatively, or additionally, the method may comprise conducting a reaction to attach the linker or a precursor of the linker to the targeting moiety to produce a switch intermediate comprising the linker or precursor of the linker conjugated to the targeting moiety. The switch intermediate may be of Formula III: Y-L1 or Formula IIIA: L1-Y, wherein Y is the targeting moiety and L1 is the linker or linker precursor. The linker may be conjugated to the targeting moiety in a site-specific manner. The linker may be conjugated to the targeting moiety in a site-independent manner. Conducting the one or more reactions to attach the CAR-ID to the targeting moiety may comprise attaching the linker portion of the switch intermediate to the CAR-ID. Conducting the one or more reactions to attach the CAR-ID to the targeting moiety may comprise contacting a plurality of switch intermediates comprising the linker or linker precursor conjugated to the targeting moiety with a plurality of CAR-IDs. Attachment of the linker portion of the switch intermediate to the CAR-ID may occur in a site-specific manner. Attachment of the linker portion of the switch intermediate may occur in a site-independent manner.

[0288] The method may comprise coupling one or more linkers to the targeting moiety to produce a switch intermediate of Formula III: Y-L1 or Formula IIIA: L1-Y, wherein Y is the targeting moiety and L1 is the linker; and conjugating the switch intermediate to the CAR-ID, thereby producing the CAR-EC switch. The switch intermediate may be conjugated to the CAR-ID in a site-specific manner. The switch intermediate may be conjugated to the CAR-ID in a site-independent manner. The method may further comprise incorporating one or more unnatural amino acids into the CAR-ID and/or targeting moiety. The switch intermediate may be conjugated to the CAR-ID in a site-specific manner through the use of the unnatural amino acid.

[0289] The method may comprise coupling one or more linkers to the CAR-ID to produce a switch intermediate of Formula II: X-L1 or Formula IIA: L1-X, wherein X is the CAR-ID and L1 is the linker; and conjugating the switch intermediate to the targeting moiety, thereby producing the CAR-EC switch. The switch intermediate may be conjugated to the targeting moiety in a site-specific manner. The switch intermediate may be conjugated to the targeting moiety in a site-independent manner. The method may further comprise incorporating one or more unnatural amino acids into the CAR-ID and/or targeting moiety. The switch intermediate may be conjugated to the targeting moiety in a site-specific manner through the use of the unnatural amino acid.

[0290] Conjugating the switch intermediate of Formula II: X-L1 or Formula IIA: L1-X, wherein X is the CAR-ID and L1, to the targeting moiety may comprise forming an oxime. Conjugating the switch intermediate of Formula III: Y-L1 or Formula IIIA: L1-Y, wherein Y is the targeting moiety and L1, to the CAR-ID may comprise forming an oxime. Forming an oxime may comprise conducting one or more reactions under acidic conditions. Forming an oxime may comprise conducting one or more reactions under slightly acidic conditions. Forming an oxime may comprise conducting one or more reactions under slightly neutral conditions.

[0291] A method of producing a switch may comprise (a) producing a targeting moiety comprising an unnatural amino acid; (b) attaching a first linker to the targeting moiety to produce a first switch intermediate comprising the targeting moiety and the first linker; (c) attaching a second switch intermediate comprising a CAR-ID and a second linker to the first switch intermediate, thereby producing the switch. The unnatural amino acid may be p-acetylphenalanine (pAcF). The unnatural amino acid may be p-azidophenylalanine (pAzF) The targeting moiety may comprise a polypeptide based on or derived from an antibody or antibody fragment. The antibody may be an anti-CD19 antibody. The targeting moiety may comprise an antibody fragment. The antibody may comprise an amino acid sequence of any one of SEQ ID NOs: 2-15, 17-25 and 27-35. The first linker may be a bifunctional linker. The linker may be a heterobifunctional linker. The linker may comprise one or more polyethylene glycol (PEG) subunits. The first linker may comprise cyclooctyne. The first linker may be a PEG-cyclooctyne linker. The linker may comprise an azide. The first linker may comprise triazole. The triazole may be 1,2,3-triazole. The triazole may be 1,2,4-triazole. The first linker may comprise an azide-PEG-aminoxy linker. The first linker may be attached to a ketone of the unnatural amino acid. The first linker may be attached to the targeting moiety via oxime ligation. The CAR-ID may comprise a small molecule. The CAR-ID may comprise FITC. The second linker may be a bifunctional linker. The linker may be a heterobifunctional linker. The linker may comprise one or more polyethylene glycol (PEG) subunits. The second linker may comprise cyclooctyne. The second linker may be a PEG-cyclooctyne linker. The linker may comprise an azide. The second linker may comprise triazole. The triazole may be 1,2,3-triazole. The triazole may be 1,2,4-triazole. The second linker may be a PEG-cyclooctyne linker. The second switch intermediate may be attached to the first switch intermediate via a click chemistry reaction. The second switch intermediate may be attached to the first switch intermediate through a cycloaddition reaction. The cycloaddition reaction may be a [3+2] cycloaddition reaction.

[0292] Conjugating the linker to the CAR-ID to produce the switch may comprise forming one or more bonds between the linker and the CAR-ID. Conjugating the linker to the targeting moiety to produce the switch may comprise forming one or more bonds between the linker and the targeting moiety. The one or more bonds may comprise an ionic bond, a covalent bond, a non-covalent bond or a combination thereof. Additional methods of conjugating the linker the CAR-ID and the targeting moiety may be performed as described in Roberts et al., Advanced Drug Delivery Reviews 54:459-476 (2002), which is included by reference in its entirety.

[0293] The CAR-ID may comprise any of the CAR-IDs disclosed herein. For example, the CAR-ID may comprise a small molecule. The CAR-ID may comprise FITC. The CAR-ID may be selected from the group consisting of DOTA, dinitrophenol, quinone, biotin, aniline, atrazine, an aniline-derivative, o-aminobenzoic acid, p-aminobenzoic acid, m-aminobenzoic acid, hydralazine, halothane, digoxigenin, benzene arsonate, lactose, trinitrophenol, biotin and derivatives thereof.

[0294] The CAR-ID may comprise a hapten. The CAR-ID may induce an immune response when attached to a larger carrier molecule, such as a protein, antibody or antibody fragment. The CAR-ID may be FITC or a derivative thereof. The CAR-ID may comprise biotin. The CAR-ID may comprise dinitrophenol.

[0295] Alternatively, the CAR-ID does not comprise a hapten. The CAR-ID may be selected from a steroid, a vitamin, a vitamer, a metabolite, an antibiotic, a monosaccharide, a disaccharide, a lipid, a fatty acid, a nucleic acid, an alkaloid, a glycoside, a phenzine, a polyketide, a terpene, and a tetrapyrrole, and portions thereof, and combinations thereof. The CAR-ID may be a penicillin drug or a derivative thereof.

[0296] The CAR-ID may be linked and/or conjugated to the target interacting domain. The target interacting domain may be a targeting antibody or antibody fragment and the CAR-ID may be linked and/or conjugated to an amino acid of the targeting antibody or antibody fragment. The amino acid of the targeting antibody or antibody fragment may be an unnatural amino acid. The targeting antibody or antibody fragment may comprise a light chain and/or heavy chain selected from SEQ ID NOS: 10-31 and the unnatural amino acids may be located at respective sites shown in Table 1. Unless otherwise noted, amino acids are counted from the amino acid of the N-terminus of each variable region to the C-terminus of the constant region.

[0297] The targeting moiety may comprise any of the targeting moieties disclosed herein. The linker may comprise any of the linkers disclosed herein. For example, the linker may comprise an aminooxy group, azide group cyclooctyne group, or a combination thereof at one or more termini. The linker may be a bifunctional linker. The linker may be a heterobifunctional linker. The linker may comprise one or more PEG subunits.

[0298] Disclosed herein are methods of producing a switch of Formula IV: X-L1-L2-Y, wherein in X is a CAR-ID, L1 is a first linker, L2 is a second linker and Y is a targeting moiety. The method may comprise (a) coupling L1 to X to produce a first switch intermediate of Formula II: X-L1; (b) coupling L2 to Y to produce a second switch intermediate of Formula V: L2-Y; and (c) linking the first switch intermediate of Formula II to the second switch intermediate of Formula: V, thereby producing the switch of Formula IV.

[0299] Disclosed herein are methods of producing a switch of Formula IVA: Y-L2-L1-X, wherein Y is a targeting moiety, L1 is a first linker, L2 is a second linker and X is a CAR-ID. The method may comprise (a) coupling L1 to X to produce a first switch intermediate of Formula IIA: L1-X; (b) coupling L2 to Y to produce a second switch intermediate of Formula VA: Y-L2; and (c) linking the first intermediate of Formula IIA to the second intermediate of Formula VA, thereby producing the CAR-EC switch of Formula IVA.

[0300] The methods may further comprise incorporating one or more unnatural amino acids into X and/or Y. The L1 may be coupled to X in a site-specific manner. The L1 may be coupled to X in a site-specific manner through the one or more unnatural amino acids. L2 may be coupled to Y in a site-specific manner. The L2 may be coupled to Y in a site-specific manner through the one or more unnatural amino acids. The method may further comprise modifying a nucleic acid encoding X to produce one or more amber codons in X. The method may further comprise modifying a nucleic acid encoding Y to produce one or more amber codons in Y.

[0301] Conjugating the linker to the CAR-ID to produce the first switch intermediate may comprise forming one or more bonds between the linker and the CAR-ID. Conjugating the linker to the targeting moiety to produce the second switch intermediate may comprise forming one or more bonds between the linker and the targeting moiety. The one or more bonds may comprise an ionic bond, a covalent bond, a non-covalent bond or a combination thereof. Additional methods of conjugating the linker the CAR-ID and the targeting moiety may be performed as described in Roberts et al., Advanced Drug Delivery Reviews 54:459-476 (2002), which is included by reference in its entirety.

[0302] Linking the first switch intermediate to the second switch intermediate may comprise a Huisgen-cycloaddition, a Diels-Halder reaction, a hetero Diels-Alder reaction or an enzyme-mediated reaction. Linking the first switch intermediate to the second switch intermediate may produce an oxime, a tetrazole, a Diels Alder adduct, a hetero Diels Alder adduct, an aromatic substitution reaction product, a nucleophilic substitution reaction product, an ester, an amide, a carbamate, an ether, a thioether, a Michael reaction product, cycloaddition product, a metathesis reaction product, a metal-mediated cross-coupling reaction product, a radical polymerization product, an oxidative coupling product, an acyl-transfer reaction product, or a photo click reaction product. Linking the first switch intermediate to the second switch intermediate may produce a disulfide bridge or a maleimide bridge.

[0303] L1 and/or L2 may comprise a linker selected from a bifunctional linker, a cleavable linker, a non-cleavable linker, an ethylene glycol linker, a bifunctional ethylene glycol linker, a flexible linker, or an inflexible linker. L1 and/or L2 may comprise a linker selected from the group comprising cyclooctyne, cyclopropene, aryl/alkyl azides, trans-cyclooctene, norborene, and tetrazines. A terminus of L1 and/or a terminus of L2 may comprise an alkoxy-amine. A terminus of L1 and/or a terminus of L2 may comprise an azide or cyclooctyne group. X may be coupled to L1 by a chemical group selected from a cyclooctyne, cyclopropene, aryl/alkyl azide, trans-cyclooctene, norborene, and tetrazine. Linking the first switch intermediate (X-L1 or L1-X) and second switch intermediate (Y-L2 or L2-Y) may comprise conducting one or more copper-free reactions. Linking the first switch intermediate (X-L1 or L1-X) and second switch intermediate (Y-L2 or L2-Y) may comprise conducting one or more copper-containing reactions. Linking the first switch intermediate (X-L1 or L1-X) and second switch intermediate (Y-L2 or L2-Y) may comprise one or more cycloadditions. Linking the first switch intermediate (X-L1 or L1-X) and second switch intermediate (Y-L2 or L2-Y) may comprise one or more Huisgen-cycloadditions. Linking the first switch intermediate (X-L1 or L1-X) and second switch intermediate (Y-L2 or L2-Y) may comprise one or more Diels Alder reactions. Linking the first switch intermediate (X-L1 or L1-X) and second switch intermediate (Y-L2 or L2-Y) may comprise one or more Hetero Diels Alder reaction.

[0304] The methods disclosed herein may comprise coupling one or more linkers to one or more target interacting domain, CAR-IDs or combinations thereof to produce one or more switch intermediates. The switch intermediate may comprise a targeting moiety attached to a linker (e.g., targeting moiety switch intermediate). The switch intermediate may comprise a CAR-ID attached to a linker (e.g., CAR-ID switch intermediates). The methods may comprise coupling a first linker to targeting moiety to produce a targeting moiety switch intermediate. The methods may comprise coupling a linker to a CAR-ID to produce a CAR-ID switch intermediate.

[0305] Coupling of the one or more linkers to the targeting moiety and the CAR-ID may occur simultaneously. Coupling of the one or more linkers to the targeting moiety and the CAR-ID may occur sequentially. Coupling of the one or more linkers to the targeting moiety and the CAR-ID may occur in a single reaction volume. Coupling of the one or more linkers to the targeting moiety and the CAR-ID may occur in two or more reaction volumes.

[0306] Coupling one or more linkers to the targeting moiety and/or the CAR-ID may comprise forming one or more oximes between the linker and the targeting moiety and/or the CAR-ID. Coupling one or more linkers to the targeting moiety and/or the CAR-ID may comprise forming one or more stable bonds between the linker and the targeting moiety and/or the CAR-ID. Coupling one or more linkers to the targeting moiety and/or the CAR-ID may comprise forming one or more covalent bonds between the linker and the targeting moiety and/or the CAR-ID. Coupling one or more linkers to the targeting moiety and/or the CAR-ID may comprise forming one or more non-covalent bonds between the linker and targeting moiety and/or the CAR-ID. Coupling one or more linkers to the targeting moiety and/or the CAR-ID may comprise forming one or more ionic bonds between the linker and the targeting moiety and/or the CAR-ID.

[0307] Coupling one or more linkers to the targeting moiety and/or the CAR-ID may comprise site-specifically coupling one or more linkers to the targeting moiety and/or the CAR-ID. Site-specific coupling may comprise linking the one or more linkers to the unnatural amino acid of the targeting moiety and/or the CAR-ID. Linking the one or more linkers to the unnatural amino acid of the targeting moiety and/or the CAR-ID may comprise formation of an oxime. Linking the one or more linkers to the unnatural amino acid of the targeting moiety and/or the CAR-ID may comprise, by way of non-limiting example, reacting a hydroxylamine of the one or more linkers with an aldehyde or ketone of an amino acid. The amino acid may be an unnatural amino acid.

[0308] Conducting the one or more reactions to site-specifically link the CAR-ID to the targeting moiety, to site-specifically attach the linker or a precursor of the linker to the CAR-ID, to site-specifically attach the linker or a precursor of the linker to the targeting moiety, to site-specifically attach the CAR-ID switch intermediate to the targeting moiety, to site-specifically attach the targeting moiety switch intermediate to the CAR-ID or to site-specifically attach the targeting moiety switch intermediate to the CAR-ID switch intermediate may comprise conducting one or more reactions selected from a copper-free reaction, a cycloadditions, a Huisgen-cycloaddition, a copper-free [3+2] Huisgen-cycloaddition, a copper-containing reaction, a Diels Alder reactions, a hetero Diels Alder reaction, metathesis reaction, a metal-mediated cross-coupling reaction, a radical polymerization, an oxidative coupling, an acyl-transfer reaction, a photo click reaction, an enzyme-mediated reaction, a transglutaminase-mediated reaction.

[0309] The switches disclosed herein may comprise a CAR-ID comprising FITC or a derivative thereof. The method of producing such switches may comprise coupling a linker or precursor thereof, a switch intermediate comprising a targeting moiety (e.g., targeting moiety switch intermediate), or a targeting moiety to the CAR-ID. Coupling the linker or precursor thereof, the targeting moiety switch intermediate to the CAR-ID may comprise conjugation of an isothiocyanate of FITC to the linker or precursor thereof, targeting moiety switch intermediate or targeting moiety. The targeting moiety may be based on or derived from a polypeptide. The polypeptide may be an antibody or antibody fragment. Coupling a targeting moiety to the CAR-ID may comprise conjugating the isothiocyanate of FITC to an amino acid of the targeting moiety. The amino acid may be a lysine. The method may comprise coupling or more CAR-IDs to the targeting moiety. The method may comprise conjugating FITC from two or more CAR-IDs to two or more amino acids of the targeting moiety. The two or more amino acids may be lysine.

[0310] Producing a switch disclosed herein may comprise ester coupling. Ester coupling may comprise forming an amide bond between the CAR-ID and the targeting moiety. Ester coupling may comprise forming an amide bond between a switch intermediate and the targeting moiety. The switch intermediate may comprise a CAR-ID attached to a linker. The amide bond may be formed between the linker of the switch intermediate and the targeting moiety. The linker may be a NHS-ester linker. The amide bond may be formed between the linker of the switch intermediate and an amino acid of the targeting moiety. The CAR-ID may comprise a small molecule. The small molecule may be FITC. The targeting moiety may be based on or derived from a polypeptide. The polypeptide may be an antibody or antibody fragment. The targeting moiety may comprise a small molecule.

[0311] The method of producing a switch disclosed herein may comprise: (a) obtaining a switch intermediate comprising (i) a CAR-ID; and (ii) a linker; and (b) contacting the switch intermediate with a targeting moiety, thereby producing the switch. Contacting the switch intermediate with the targeting moiety may comprise performing an ester coupling reaction. The linker may comprise a NHS-ester linker. The targeting moiety may comprise one or more amino acids. Performing the ester coupling reaction may comprise forming an amide bond between the NHS-ester linker of the switch intermediate and the one or more amino acids of the targeting moiety. The method may further comprise producing a plurality of switches. Two or more switches of the plurality of switches may comprise two or more switch intermediates attached to two or more different amino acids of the targeting moiety. For example, a first switch intermediate may be attached to a lysine residue of a first targeting moiety and a second switch intermediate may be attached to a glycine residue of a second targeting moiety. Two or more switches of the plurality of switches may comprise two or more switch intermediates attached to the same amino acid of the targeting moiety. For example, the two or more switch intermediates may be attached to a lysine residue of a first and second targeting moiety. Two or more switches of the plurality of switches may comprise two or more switch intermediates attached to the same amino acid located at two or more different positions in the targeting moiety. For example, a first switch intermediate may be attached to lysine 10 of a first targeting moiety and the second switch intermediate may be attached to lysine 45 of a second targeting moiety. Two or more switches of the plurality of switches may comprise two or more switch intermediates attached to the same amino acid located at the same position in the targeting moiety. For example, a first switch intermediate may be attached to lysine 10 of a first targeting moiety and the second switch intermediate may be attached to lysine 10 of a second targeting moiety.

[0312] Methods of producing a switch disclosed herein may comprise using one or more unnatural amino acids. The method may comprise incorporating one or more unnatural amino acids into the CAR-ID. The CAR-ID may be based on or derived from a polypeptide that can interact with a CAR on an effector cell. The polypeptide may be a non-antibody based polypeptide. Generally, a non-antibody based polypeptide is a polypeptide that does not comprise an antibody or antibody fragment. The unnatural amino acid may be incorporated into the non-antibody based polypeptide. The unnatural amino acid may replace an amino acid of the non-antibody based polypeptide. Alternatively, or additionally, the method may comprise incorporating one or more unnatural amino acids into the targeting moiety. The targeting moiety may be based on or derived from a polypeptide. The polypeptide may be an antibody. The polypeptide may be a non-antibody based polypeptide. The unnatural amino acid may be incorporated into the polypeptide. The unnatural amino acid may replace an amino acid of the polypeptide.

[0313] The method of producing the switch may further comprise modifying one or more amino acid residues in polypeptide from which the CAR-ID is based or derived. The method of producing the switch may comprise modifying one or more amino acid residues in polypeptide from which the targeting moiety is based or derived. Modifying the one or more amino acid residues may comprise mutating one or more nucleotides in the nucleotide sequence encoding the polypeptide. Mutating the one or more nucleotides in the nucleotide sequence encoding may comprise altering a codon encoding an amino acid to a nonsense codon.

[0314] Incorporating one or more unnatural amino acids into the polypeptide from which the CAR-ID is based or derived may comprise modifying one or more amino acid residues in the polypeptide to produce one or more amber codons in the antibody or antibody fragment. Incorporating one or more unnatural amino acids into the polypeptide from which the targeting moiety is based or derived may comprise modifying one or more amino acid residues in the polypeptide to produce one or more amber codons in the antibody or antibody fragment.

[0315] The one or more unnatural amino acids may be incorporated into the polypeptide in response to an amber codon. The one or more unnatural amino acids may be site-specifically incorporated into the polypeptide.

[0316] Incorporating one or more unnatural amino acids into the polypeptide from which the CAR-ID and the targeting moiety are based or derived may comprise use of one or more genetically encoded unnatural amino acids with orthogonal chemical reactivity relative to the canonical twenty amino acids to site-specifically modify the antibody, antibody fragment, or targeting peptide. Incorporating one or more unnatural amino acids may comprise the use of one or more tRNA synthetases. The tRNA synthetase may be an aminoacyl tRNA synthetase. The tRNA synthetase may be a mutant tRNA synthesis. Incorporating one or more unnatural amino acids may comprise a tRNA/tRNA synthetase pair. The tRNA/tRNA synthetase pair may comprise a tRNA/aminoacyl-tRNA synthetase pair. The tRNA/tRNA synthetase pair may comprise a tRNATyr/tyrosyl-tRNA synthetase pair. Incorporating the one or more unnatural amino acids may comprise use of an evolved tRNA/aminoacyl-tRNA synthetase pair to site-specifically incorporate one or more unnatural amino acids at defined sites in the polypeptide in response to one or more amber nonsense codon.

[0317] Additional methods for incorporating unnatural amino acids include, but are not limited to, methods disclosed in Chatterjee et al. (A Versatile Platform for Single- and Multiple-Unnatural Amino Acid Mutagenesis in Escherichia coli, Biochemistry, 2013), Kazane et al. (J Am Chem Soc, 135(1):340-6, 2013), Kim et al. (J Am Chem Soc, 134(24):9918-21, 2012), Johnson et al. (Nat Chem Biol, 7(11):779-86, 2011) and Hutchins et al. (J Mol Biol, 406(4):595-603, 2011).

[0318] A method of producing a switch for activating a chimeric antigen receptor-effector cell (CAR-EC) may comprise (a) obtaining a targeting moiety comprising an unnatural amino acid; and (b) attaching a chimeric antigen receptor-interacting domain (CAR-ID) to the targeting moiety, thereby producing the switch. Thus, in some embodiments the method comprises attaching a CAR-ID to an unnatural amino acid comprised in a targeting moiety that is a humanized anti-CD19 antibody or a CD19-binding fragment thereof.

[0319] Attaching the CAR-ID to the targeting moiety may comprise one or cycloadditions. The one or more cycloadditions may comprise a Huisgen cycloaddition. The one or more cycloadditions may comprise a [3+2] cycloaddition. The one or more cycloadditions may comprise a [3+2] Huisgen cycloaddition. The one or more cycloadditions may comprise a copper-free cycloaddition. Attaching the CAR-ID to the targeting moiety may comprise a copper free reaction. Attaching the CAR-ID to the targeting moiety may comprise one or more copper-containing reactions. Attaching the CAR-ID to the targeting moiety may comprise one or more Diels Alder reactions. Attaching the CAR-ID to the targeting moiety may comprise one or more hetero Diels Alder reactions. Attaching the CAR-ID to the targeting moiety may comprise one or more ester couplings. Attaching the CAR-ID to the targeting moiety may comprise one or more isothiocyanate couplings. Attaching the CAR-ID to the targeting moiety may comprise attaching the CAR-ID to an amino acid of targeting moiety. The amino acid may be an unnatural amino acid. Attaching the CAR-ID to the targeting moiety may comprise one or more bioorthogonal reactions. The CAR-ID may be attached to the targeting moiety in a site-specific manner. The CAR-ID may be attached to a predetermined site in the targeting moiety. The CAR-ID may be attached to the targeting moiety in a site-independent manner.

[0320] The method may further comprise attaching a first linker to the targeting moiety to produce first switch intermediate. Attaching the first linker to the targeting moiety may comprise one or cycloadditions. Attaching the first linker to the targeting moiety may comprise a copper free reaction. Attaching the first linker to the targeting moiety may comprise one or more copper-containing reactions. Attaching the first linker to the targeting moiety may comprise one or more Diels Alder reactions. Attaching the first linker to the targeting moiety may comprise one or more hetero Diels Alder reactions. Attaching the first linker to the targeting moiety may comprise one or more ester couplings. Attaching the first linker to the targeting moiety may comprise oxime ligation. Attaching the first linker to the targeting moiety may comprise forming one or more oximes between the first linker and the targeting moiety. Attaching the first linker to the targeting moiety may comprise forming one or more stable bonds between the first linker and the targeting moiety. Attaching the first linker to the targeting moiety may comprise forming one or more covalent bonds between the first linker and the targeting moiety. Attaching the first linker to the targeting moiety may comprise forming one or more non-covalent bonds between the first linker and the targeting moiety. Attaching the first linker to the targeting moiety may comprise forming one or more ionic bonds between the first linker and the targeting moiety. Attaching the first linker to the targeting moiety may comprise attaching the linker to an amino acid of targeting moiety. The amino acid may be an unnatural amino acid. Attaching the first linker to the targeting moiety may comprise one or more bioorthogonal reactions.

[0321] Attaching the CAR-ID to the targeting moiety may comprise attaching the first switch intermediate to the CAR-ID. Attaching the first switch intermediate to the CAR-ID may comprise one or cycloadditions. The one or more cycloadditions may comprise a Huisgen cycloaddition. The one or more cycloadditions may comprise a [3+2] cycloaddition. The one or more cycloadditions may comprise a [3+2] Huisgen cycloaddition. The one or more cycloadditions may comprise a copper-free cycloaddition. Attaching the first switch intermediate to the CAR-ID may comprise a copper free reaction. Attaching the first switch intermediate to the CAR-ID may comprise one or more copper-containing reactions. Attaching the first switch intermediate to the CAR-ID may comprise one or more Diels Alder reactions. Attaching the first switch intermediate to the CAR-ID may comprise one or more hetero Diels Alder reactions. Attaching the first switch intermediate to the CAR-ID may comprise one or more ester couplings. Attaching the first switch intermediate to the CAR-ID may comprise one or more isothiocyanate couplings.

[0322] The method may further comprise attaching a second linker to the CAR-ID to produce a second switch intermediate. Attaching the second linker to the CAR-ID may comprise one or cycloadditions. Attaching the second linker to the CAR-ID may comprise a copper free reaction. Attaching the second linker to the CAR-ID may comprise one or more copper-containing reactions. Attaching the second linker to the CAR-ID may comprise one or more Diels Alder reactions. Attaching the second linker to the CAR-ID may comprise one or more hetero Diels Alder reactions. Attaching the second linker to the CAR-ID may comprise one or more ester couplings. Attaching the second linker to the CAR-ID may comprise oxime ligation. Attaching the second linker to the CAR-ID may comprise forming one or more oximes between the second linker and the CAR-ID. Attaching the second linker to the CAR-ID may comprise forming one or more stable bonds between the second linker and the CAR-ID. Attaching the second linker to the CAR-ID may comprise forming one or more covalent bonds between the second linker and the CAR-ID. Attaching the second linker to the CAR-ID may comprise forming one or more non-covalent bonds between the second linker and the CAR-ID. Attaching the second linker to the CAR-ID may comprise forming one or more ionic bonds between the second linker and the CAR-ID.

[0323] Attaching the CAR-ID to the targeting moiety may comprise attaching the second switch intermediate to the targeting moiety. Attaching the second switch intermediate to the targeting moiety may comprise one or cycloadditions. The one or more cycloadditions may comprise a Huisgen cycloaddition. The one or more cycloadditions may comprise a [3+2] cycloaddition. The one or more cycloadditions may comprise a [3+2] Huisgen cycloaddition. The one or more cycloadditions may comprise a copper-free cycloaddition. Attaching the second switch intermediate to the targeting moiety may comprise a copper free reaction. Attaching the second switch intermediate to the targeting moiety may comprise one or more copper-containing reactions. Attaching the second switch intermediate to the targeting moiety may comprise one or more Diels Alder reactions. Attaching the second switch intermediate to the targeting moiety may comprise one or more hetero Diels Alder reactions. Attaching the second switch intermediate to the targeting moiety may comprise one or more ester couplings. Attaching the second switch intermediate to the targeting moiety may comprise one or more isothiocyanate couplings. Attaching the second switch intermediate to the targeting moiety may comprise attaching the linker to an amino acid of CAR-ID. The amino acid may be an unnatural amino acid. Attaching the second switch intermediate to the targeting moiety may comprise one or more bioorthogonal reactions.

[0324] Attaching the CAR-ID to the targeting moiety may comprise attaching the first switch intermediate to the second switch intermediate. Attaching the first switch intermediate to the second switch intermediate may comprise one or cycloadditions. The one or more cycloadditions may comprise a Huisgen cycloaddition. The one or more cycloadditions may comprise a [3+2] cycloaddition. The one or more cycloadditions may comprise a [3+2] Huisgen cycloaddition. The one or more cycloadditions may comprise a copper-free cycloaddition. Attaching the first switch intermediate to the second switch intermediate may comprise a copper free reaction. Attaching the first switch intermediate to the second switch intermediate may comprise one or more copper-containing reactions. Attaching the first switch intermediate to the second switch intermediate may comprise one or more Diels Alder reactions. Attaching the first switch intermediate to the second switch intermediate may comprise one or more hetero Diels Alder reactions. Attaching the first switch intermediate to the second switch intermediate may comprise one or more ester couplings. Attaching the first switch intermediate to the second switch intermediate may comprise one or more isothiocyanate couplings.

[0325] Disclosed herein are CAR-EC switches comprising (a) a CAR-ID comprising a peptide from a yeast transcription factor peptide; and (b) a humanized FMC63 antibody or an antigen binding portion thereof (e.g., any one of the humanized FMC63 antibodies described herein). The yeast transcription factor peptide may be a GCN4 peptide. The humanized FMC63 antibody or antibody fragment may comprise a heavy chain of a humanized FMC63 antibody. The heavy chain sequence may comprise any one of SEQ ID NOS: 2-15. The humanized FMC63 antibody or antibody fragment may comprise a light chain a humanized FMC63 antibody. The light chain sequence may comprise any one of SEQ ID NOS: 17-25 or any one of SEQ ID NOS: 27-35. The humanized FMC63 antibody or antibody fragment may comprise a Fab of a humanized FMC63 antibody. The humanized FMC63 antibody or antibody fragment may comprise a full length humanized FMC63 antibody or a fragment thereof. Disclosed herein is also an anti-GCN4 CAR and a CAR-EC expressing an anti-GCN4 CAR. In some embodiments, co-treatment of a subject with (i) a CAR-EC switch comprising (a) a CAR-ID comprising a peptide from a yeast transcription factor peptide (e.g., a GCN4 peptide disclosed herein); and (b) a humanized FMC63 antibody or an antigen binding portion thereof (e.g., any one of the humanized FMC63 antibodies described herein) and (ii) a CAR-EC expressing an anti-GCN4 CAR results in switch mediated cytotoxicity of a CD19-expressing target cell.

[0326] Disclosed herein are CAR-EC switches comprising (a) a CAR-ID comprising a Flag peptide; and (b) a humanized FMC63 antibody or an antigen binding portion thereof (e.g., any one of the humanized FMC63 antibodies described herein). The Flag peptide may comprise any one of the following sequences: DYKDDDDK (SEQ ID NO: 40) and DYKDDDDKP (SEQ ID NO: 39). The humanized FMC63 antibody or antibody fragment may comprise a heavy chain of a humanized FMC63 antibody. The heavy chain sequence may comprise any one of SEQ ID NOS: 2-15. The humanized FMC63 antibody or antibody fragment may comprise a light chain a humanized FMC63 antibody. The light chain sequence may comprise any one of SEQ ID NOS: 17-25 or any one of SEQ ID NOS: 27-35. The humanized FMC63 antibody or antibody fragment may comprise a Fab of a humanized FMC63 antibody. The humanized FMC63 antibody or antibody fragment may comprise a full length humanized FMC63 antibody or a fragment thereof. Disclosed herein is also an anti-Flag CAR and a CAR-EC expressing an anti-Flag CAR. In some embodiments, co-treatment of a subject with (i) a CAR-EC switches comprising (a) a CAR-ID comprising a Flag peptide; and (b) a humanized FMC63 antibody or an antigen binding portion thereof (e.g., any one of the humanized FMC63 antibodies described herein) and (ii) a CAR-EC expressing an anti-Flag CAR results in switch mediated cytotoxicity of a CD19-expressing target cell.

[0327] Disclosed herein are CAR-EC switches comprising (a) a CAR-ID comprising FITC; and (b) a humanized FMC63 antibody or an antigen binding portion thereof (e.g., any one of the humanized FMC63 antibodies described herein). The FITC may be conjugated to the humanized FMC63 antibody non-specifically. The FITC may be conjugated to the humanized FMC63 antibody site-specifically. The site-specific conjugation may be to an artificial amino acid comprised in the humanized FMC63 antibody. The conjugation may be via a linker that links the humanized FMC63 antibody to the FITC. The humanized FMC63 antibody or antibody fragment may comprise a heavy chain of a humanized FMC63 antibody. The heavy chain sequence may comprise any one of SEQ ID NOS: 2-15. The humanized FMC63 antibody or antibody fragment may comprise a light chain a humanized FMC63 antibody. The light chain sequence may comprise any one of SEQ ID NOS: 17-25 or any one of SEQ ID NOS: 27-35. The humanized FMC63 antibody or antibody fragment may comprise a Fab of a humanized FMC63 antibody. The humanized FMC63 antibody or antibody fragment may comprise a full length humanized FMC63 antibody or a fragment thereof. Disclosed herein is also an anti-FITC CAR and a CAR-EC expressing an anti-FITC CAR. In some embodiments, co-treatment of a subject with (i) a CAR-EC switches comprising (a) a CAR-ID comprising a FITC; and (b) a humanized FMC63 antibody or an antigen binding portion thereof (e.g., any one of the humanized FMC63 antibodies described herein) and (ii) a CAR-EC expressing an anti-FITC CAR results in switch mediated cytotoxicity of a CD19-expressing target cell.

[0328] Disclosed herein are CAR-EC switches comprising (a) a CAR-ID comprising a K4 peptide or an E4 peptide; and (b) a humanized FMC63 antibody or an antigen binding portion thereof (e.g., any one of the humanized FMC63 antibodies described herein). The K4 peptide may comprise the amino acid sequence: KVAALKEKVAALKEKVAALKEKVAALKE (SEQ ID NO: 43). The E4 peptide may comprise the amino acid sequence: EVAALEKEVAALEKEVAALEKEVAALEK (SEQ ID NO: 44). The humanized FMC63 antibody or antibody fragment may comprise a heavy chain of a humanized FMC63 antibody. The heavy chain sequence may comprise any one of SEQ ID NOS: 2-15. The humanized FMC63 antibody or antibody fragment may comprise a light chain a humanized FMC63 antibody. The light chain sequence may comprise any one of SEQ ID NOS: 17-25 or any one of SEQ ID NOS: 27-35. The humanized FMC63 antibody or antibody fragment may comprise a Fab of a humanized FMC63 antibody. The humanized FMC63 antibody or antibody fragment may comprise a full length humanized FMC63 antibody or a fragment thereof. Disclosed herein is also a CAR comprising a K4 extracellular domain. Disclosed herein is also a CAR comprising an E4 extracellular domain. Disclosed herein is also a CAR-EC expressing a CAR comprising a K4 extracellular domain. Disclosed herein is also a CAR-EC expressing a CAR comprising a E4 extracellular domain.

[0329] In some embodiments, co-treatment of a subject with (i) a CAR-EC switch comprising (a) a CAR-ID comprising a K4 peptide; and (b) a humanized FMC63 antibody or an antigen binding portion thereof (e.g., any one of the humanized FMC63 antibodies described herein) and (ii) a CAR-EC expressing a CAR comprising an E4 extracellular domain results in switch mediated cytotoxicity of a CD19-expressing target cell. In some embodiments, co-treatment of a subject with (i) a CAR-EC switch comprising (a) a CAR-ID comprising a E4 peptide; and (b) a humanized FMC63 antibody or an antigen binding portion thereof (e.g., any one of the humanized FMC63 antibodies described herein) and (ii) a CAR-EC expressing a CAR comprising an K4 extracellular domain results in switch mediated cytotoxicity of a CD19-expressing target cell.

### III. Purification of CAR-EC Switches and Portions Thereof

[0330] Disclosed herein are methods of purifying humanized CAR-EC switches disclosed herein, comprising separating the humanized CAR-EC switches disclosed herein from components of a CAR-EC switch production system (e.g., cellular debris, free amino acids). Purifying the CAR-EC switch may comprise use of one or more concentrator columns, electrophoresis, filtration, centrifugation, chromatography or a combination thereof. Chromatography may comprise size-exclusion chromatography. Additional chromatography methods include, but are not limited to, hydrophobic interaction chromatography, ion exchange chromatography, affinity chromatography, metal binding, immunoaffinity chromatography, and high performance liquid chromatography or high pressure liquid chromatography. Electrophoresis may comprise denaturing electrophoresis or non-denaturing electrophoresis.

[0331] The humanized CAR-EC switches may comprise one or more peptide tags. The methods of purifying humanized CAR-EC switches may comprise binding one or more peptide tags of the humanized CAR-EC switches to a capturing agent. The capturing agent may be selected from an antibody, a column, a bead and a combination thereof. The one or more tags may be cleaved by one or more proteases. Examples of tags include, but are not limited to, polyhistidine, FLAG® tag, HA, c-myc, V5, chitin binding protein (CBP), maltose binding protein (MBP), and glutathione-S-transferase (GST). The peptide tag may be the CAR-ID. The peptide tag may be HTP. The peptide tag may be yeast transcription factor GCN4.

[0332] The methods may further comprise lyophilization or ultracentrifugation of the CAR-IDs, targeting polypeptides and/or the humanized CAR-EC switches.

[0333] The purity of the CAR-IDs, targeting polypeptides and/or the humanized CAR-EC switches may be equal to or greater than 50%, 55%, 60%, 65%, 70%, 75%, 80%, 85%, 90%, 91%, 92%, 93%, 94%, 95%, 96%, 97%, 98%, 99% or more. The purity of the CAR-IDs, targeting polypeptides and/or the humanized CAR-EC switches may be equal to or greater than 85%. The purity of the CAR-IDs, targeting polypeptides and/or the humanized CAR-EC switches may be equal to or greater than 90%. The purity of the CAR-IDs, targeting polypeptides and/or the humanized CAR-EC switches may be equal to or greater than 95%. The purity of the CAR-IDs, targeting polypeptides and/or the humanized CAR-EC switches may be equal to or greater than 97%. A humanized CAR-EC switch purified according to such methods of purifying humanized CAR-EC switches is referred to herein as a “purified CAR-EC switches” or a “purified humanized CAR-EC switch.” The purified CAR-EC switches may be endotoxin-free or substantially endotoxin-free.

[0334] The methods of producing humanized CAR-EC switches disclosed herein may comprise producing humanized CAR-EC switches that are structurally homogeneous. The method of producing the CAR-EC switch from a polynucleotide may result in one or more humanized CAR-EC switches that have the same or similar form, features, binding affinities (e.g., for the CAR or the target), geometry and/or size. The homogeneity of the humanized CAR-EC switches may be equal to or greater than 50%, 55%, 60%, 65%, 70%, 75%, 80%, 85%, 90%, 91%, 92%, 93%, 94%, 95%, 96%, 97%, 98%, 99% or more. The homogeneity of the humanized CAR-EC switches may be equal to or greater than 85%. The homogeneity humanized CAR-EC switches may be equal to or greater than 90%. The homogeneity of the humanized CAR-EC switches may be equal to or greater than 95%. The homogeneity of the humanized CAR-EC switches may be equal to or greater than 97%. The homogeneity may be a structural homogeneity. The homogeneity may be a structural homogeneity prior to administering the cell to a subject. The homogeneity may be a structural homogeneity prior to modifications to the CAR-EC switch by cellular activities (methylation, acetylation, glycosylation, etc.). These high percentages of homogeneity may provide a more predictable effect of the CAR-EC switch. These high percentages of homogeneity may provide for less off-target effects of the CAR-EC switch, when combined with a CAR-EC to treat a condition in a subject.

### IV. Pharmaceutical Compositions

[0335] Disclosed herein is a pharmaceutical composition comprising one or more of the humanized CAR-EC Switches disclosed herein. One or more of the CAR-EC switches may be a purified CAR-EC switch. In some embodiments, the pharmaceutical composition comprises one or more purified humanized CAR-EC Switch disclosed herein. The compositions may further comprise one or more pharmaceutically acceptable salts, excipients or vehicles. The pharmaceutical compositions may be endotoxin-free or substantially endotoxin-free.

[0336] In some embodiments, the disclosure provides a pharmaceutical composition comprising a pharmaceutically acceptable salt, an excipient, a vehicle, or a combination thereof, and a CAR-EC switch comprising a light chain and a heavy chain, wherein the light chain comprises or consists of any switch light chain sequence disclosed herein and the heavy chain comprises or consists of any switch heavy chain sequence disclosed herein. Such heavy and/or light chain sequences may be humanized. In some embodiments, the CAR-EC switch comprised in the pharmaceutical composition is humanized and comprises a light chain sequence selected from SEQ ID NOS: 17-24 and a heavy chain sequence selected from SEQ ID NOS: 2-14, wherein one or both of the heavy and light chains comprise a CAR-ID disclosed herein (e.g., a GCN4 CAR-ID). In some embodiments, the CAR-EC switch comprised in the pharmaceutical composition is humanized and comprises a light chain sequence that is at least 85%, 90%, 95%, 96%, 97%, 98%, or at least 99% identical to a sequence selected from SEQ ID NOS: 17-24 and a heavy chain sequence that is at least 85%, 90%, 95%, 96%, 97%, 98%, or at least 99% identical to a sequence selected from SEQ ID NOS: 2-14, wherein one or both of the heavy and light chains comprise a CAR-ID disclosed herein (e.g., a GCN4 CAR-ID). In some particular embodiments, the light chain sequence comprises a humanized sequence selected from SEQ ID NOS: 27-34 (which comprise an N-terminal GCN4 CAR-ID) and a heavy chain sequence selected from SEQ ID NOS: 2-14. In some particular embodiments, the light chain sequence comprises a humanized sequence that is at least 85%, 90%, 95%, 96%, 97%, 98%, or at least 99% identical to a sequence selected from SEQ ID NOS: 27-34 (which comprise an N-terminal GCN4 CAR-ID) and a heavy chain sequence that is at least 85%, 90%, 95%, 96%, 97%, 98%, or at least 99% identical to a sequence selected from SEQ ID NOS: 2-14. In some particular embodiments, the switch is a switch described in Table 6 or Table 8, which presents heavy chain/light chain combinations comprised in several of the switches disclosed herein. In some embodiments, the switch is identical to a switch described in Table 6 or Table 8, except that the CAR-ID comprised in the switch is modified to have a sequence of Structure I. In some embodiments, the sequence of Structure I is selected from any one of SEQ ID NOS: 26, 36, 139, and 154-163. The pharmaceutical composition may comprise a single switch. The pharmaceutical composition may comprise a plurality of switches. The plurality of switches may each comprise the same CAR-ID. Two or more of the plurality of switches may each comprise a different CAR-ID. The plurality of switches may each be bound by the same CAR on a CAR-EC. The CAR-ID may be a GCN4 derivative disclosed herein.

[0337] Pharmaceutically acceptable salts, excipients, or vehicles for use in the present pharmaceutical compositions include carriers, excipients, diluents, antioxidants, preservatives, coloring, flavoring and diluting agents, emulsifying agents, suspending agents, solvents, fillers, bulking agents, buffers, delivery vehicles, tonicity agents, cosolvents, wetting agents, complexing agents, buffering agents, antimicrobials, and surfactants.

[0338] Neutral buffered saline or saline mixed with serum albumin are exemplary appropriate carriers. The pharmaceutical compositions may include antioxidants such as ascorbic acid; low molecular weight polypeptides; proteins, such as serum albumin, gelatin, or immunoglobulins; hydrophilic polymers such as polyvinylpyrrolidone; amino acids such as glycine, glutamine, asparagine, arginine or lysine; monosaccharides, disaccharides, and other carbohydrates including glucose, mannose, or dextrins; chelating agents such as EDTA; sugar alcohols such as mannitol or sorbitol; salt-forming counterions such as sodium; and/or nonionic surfactants such as Tween, pluronics, or polyethylene glycol (PEG). Also by way of example, suitable tonicity enhancing agents include alkali metal halides (preferably sodium or potassium chloride), mannitol, sorbitol, and the like. Suitable preservatives include benzalkonium chloride, thimerosal, phenethyl alcohol, methylparaben, propylparaben, chlorhexidine, sorbic acid and the like. Hydrogen peroxide also may be used as preservative. Suitable cosolvents include glycerin, propylene glycol, and PEG. Suitable complexing agents include caffeine, polyvinylpyrrolidone, beta-cyclodextrin or hydroxy-propyl-beta-cyclodextrin. Suitable surfactants or wetting agents include sorbitan esters, polysorbates such as polysorbate 80, tromethamine, lecithin, cholesterol, tyloxapal, and the like. The buffers may be conventional buffers such as acetate, borate, citrate, phosphate, bicarbonate, or Tris-HCl. Acetate buffer may be about pH 4-5.5, and Tris buffer may be about pH 7-8.5. Additional pharmaceutical agents are set forth in Remington's Pharmaceutical Sciences, 18th Edition, A. R. Gennaro, ed., Mack Publishing Company, 1990.

[0339] The composition may be in liquid form or in a lyophilized or freeze-dried form and may include one or more lyoprotectants, excipients, surfactants, high molecular weight structural additives and/or bulking agents (see, for example, U.S. Pat. Nos. 6,685,940, 6,566,329, and 6,372,716). In one embodiment, a lyoprotectant is included, which is a non-reducing sugar such as sucrose, lactose or trehalose. The amount of lyoprotectant generally included is such that, upon reconstitution, the resulting formulation will be isotonic, although hypertonic or slightly hypotonic formulations also may be suitable. In addition, the amount of lyoprotectant should be sufficient to prevent an unacceptable amount of degradation and/or aggregation of the protein upon lyophilization. Exemplary lyoprotectant concentrations for sugars (e.g., sucrose, lactose, trehalose) in the pre-lyophilized formulation are from about 10 mM to about 400 mM. In another embodiment, a surfactant is included, such as for example, nonionic surfactants and ionic surfactants such as polysorbates (e.g., polysorbate 20, polysorbate 80); poloxamers (e.g., poloxamer 188); poly(ethylene glycol) phenyl ethers (e.g., Triton); sodium dodecyl sulfate (SDS); sodium laurel sulfate; sodium octyl glycoside; lauryl-, myristyl-, linoleyl-, or stearyl-sulfobetaine; lauryl-, myristyl-, linoleyl- or stearyl-sarcosine; linoleyl, myristyl-, or cetyl-betaine; lauroamidopropyl-, cocamidopropyl-, linoleamidopropyl-, myristamidopropyl-, palmidopropyl-, or isostearamidopropyl-betaine (e.g., lauroamidopropyl); myristamidopropyl-, palmidopropyl-, or isostearamidopropyl-dimethylamine; sodium methyl cocoyl-, or disodium methyl ofeyl-taurate; and the MONAQUAT™ series (Mona Industries, Inc., Paterson, N.J.), polyethyl glycol, polypropyl glycol, and copolymers of ethylene and propylene glycol (e.g., Pluronics, PF68 etc). Exemplary amounts of surfactant that may be present in the pre-lyophilized formulation are from about 0.001-0.5%. High molecular weight structural additives (e.g., fillers, binders) may include for example, acacia, albumin, alginic acid, calcium phosphate (dibasic), cellulose, carboxymethylcellulose, carboxymethylcellulose sodium, hydroxyethylcellulose, hydroxypropylcellulose, hydroxypropylmethylcellulose, microcrystalline cellulose, dextran, dextrin, dextrates, sucrose, tylose, pregelatinized starch, calcium sulfate, amylose, glycine, bentonite, maltose, sorbitol, ethylcellulose, disodium hydrogen phosphate, disodium phosphate, disodium pyrosulfite, polyvinyl alcohol, gelatin, glucose, guar gum, liquid glucose, compressible sugar, magnesium aluminum silicate, maltodextrin, polyethylene oxide, polymethacrylates, povidone, sodium alginate, tragacanth microcrystalline cellulose, starch, and zein. Exemplary concentrations of high molecular weight structural additives are from 0.1% to 10% by weight. In other embodiments, a bulking agent (e.g., mannitol, glycine) may be included.

[0340] Compositions may be sterile. Compositions may be pyrogen-free or substantially pyrogen-free. Compositions may be endotoxin-free or substantially endotoxin-free. Compositions may be isotonic aqueous solutions. Compositions may contain pharmaceutically acceptable preservatives.

[0341] Compositions may be suitable for parenteral administration. Exemplary compositions are suitable for injection or infusion into an animal by any route available to the skilled worker, such as intraarticular, subcutaneous, intravenous, intramuscular, intraperitoneal, intracerebral (intraparenchymal), intracerebroventricular, intramuscular, intraocular, intraarterial, or intralesional routes. A parenteral formulation typically will be a sterile, pyrogen-free, isotonic aqueous solution, optionally containing pharmaceutically acceptable preservatives.

[0342] Examples of non-aqueous solvents are propylene glycol, polyethylene glycol, vegetable oils such as olive oil, and injectable organic esters such as ethyl oleate. Aqueous carriers include water, alcoholic/aqueous solutions, emulsions or suspensions, including saline and buffered media. Parenteral vehicles include sodium chloride solution, Ringers' dextrose, dextrose and sodium chloride, lactated Ringer's, or fixed oils. Intravenous vehicles include fluid and nutrient replenishers, electrolyte replenishers, such as those based on Ringer's dextrose, and the like. Preservatives and other additives may also be present, such as, for example, anti-microbials, anti-oxidants, chelating agents, inert gases and the like. See generally, Remington's Pharmaceutical Science, 16th Ed., Mack Eds., 1980, incorporated herein by reference in its entirety.

[0343] Pharmaceutical compositions described herein may be formulated for controlled or sustained delivery in a manner that provides local concentration of the product (e.g., bolus, depot effect) and/or increased stability or half-life in a particular local environment. The compositions may comprise the formulation of Switches, polypeptides, nucleic acids, or vectors disclosed herein with particulate preparations of polymeric compounds such as polylactic acid, polyglycolic acid, etc., as well as agents such as a biodegradable matrix, injectable microspheres, microcapsular particles, microcapsules, bioerodible particles beads, liposomes, and implantable delivery devices that provide for the controlled or sustained release of the active agent which then may be delivered as a depot injection. Techniques for formulating such sustained- or controlled-delivery means are known and a variety of polymers have been developed and used for the controlled release and delivery of drugs. Such polymers are typically biodegradable and biocompatible. Polymer hydrogels, including those formed by complexation of enantiomeric polymer or polypeptide segments, and hydrogels with temperature or pH sensitive properties, may be desirable for providing drug depot effect because of the mild and aqueous conditions involved in trapping bioactive protein agents (e.g., antibodies comprising an ultralong CDR3). See, for example, the description of controlled release porous polymeric microparticles for the delivery of pharmaceutical compositions in WO 93/15722. Suitable materials for this purpose include polylactides (see, e.g., U.S. Pat. No. 3,773,919), polymers of poly-(a-hydroxycarboxylic acids), such as poly-D-(−)-3-hydroxybutyric acid (EP 133,988A), copolymers of L-glutamic acid and gamma ethyl-L-glutamate (Sidman et al., Biopolymers, 22: 547-556 (1983)), poly(2-hydroxyethyl-methacrylate) (Langer et al., J. Biomed. Mater. Res., 15: 167-277 (1981), and Langer, Chem. Tech., 12: 98-105 (1982)), ethylene vinyl acetate, or poly-D(−)-3-hydroxybutyric acid. Other biodegradable polymers include poly(lactones), poly(acetals), poly(orthoesters), and poly(orthocarbonates). Sustained-release compositions also may include liposomes, which may be prepared by any of several methods known in the art (see, e.g., Eppstein et al., Proc. Natl. Acad. Sci. USA, 82: 3688-92 (1985)). The carrier itself, or its degradation products, should be nontoxic in the target tissue and should not further aggravate the condition. This may be determined by routine screening in animal models of the target disorder or, if such models are unavailable, in normal animals. Microencapsulation of recombinant proteins for sustained release has been performed successfully with human growth hormone (rhGH), interferon-(rhIFN-), interleukin-2, and MN rgp120. Johnson et al., Nat. Med., 2:795-799 (1996); Yasuda, Biomed. Ther., 27:1221-1223 (1993); Hora et al., Bio/Technology. 8:755-758 (1990); Cleland, “Design and Production of Single Immunization Vaccines Using Polylactide Polyglycolide Microsphere Systems,” in Vaccine Design: The Subunit and Adjuvant Approach, Powell and Newman, eds, (Plenum Press: New York, 1995), pp. 439-462; WO 97/03692, WO 96/40072, WO 96/07399; and U.S. Pat. No. 5,654,010. The sustained-release formulations of these proteins were developed using poly-lactic-coglycolic acid (PLGA) polymer due to its biocompatibility and wide range of biodegradable properties. The degradation products of PLGA, lactic and glycolic acids may be cleared quickly within the human body. Moreover, the degradability of this polymer may be depending on its molecular weight and composition. Lewis, “Controlled release of bioactive agents from lactide/glycolide polymer,” in: M. Chasin and R. Langer (Eds.), Biodegradable Polymers as Drug Delivery Systems (Marcel Dekker: New York, 1990), pp. 1-41. Additional examples of sustained release compositions include, for example, EP 58,481 Å, U.S. Pat. No. 3,887,699, EP 158,277 Å, Canadian Patent No. 1176565, U. Sidman et al., Biopolymers 22, 547 [1983], R. Langer et al., Chem. Tech. 12, 98 [1982], Sinha et al., J. Control. Release 90, 261 [2003], Zhu et al., Nat. Biotechnol. 18, 24 [2000], and Dai et al., Colloids Surf B Biointerfaces 41, 117 [2005].

[0344] Bioadhesive polymers are also contemplated for use in or with compositions of the present disclosure. Bioadhesives are synthetic and naturally occurring materials able to adhere to biological substrates for extended time periods. For example, carbopol and polycarbophil are both synthetic cross-linked derivatives of poly(acrylic acid). Bioadhesive delivery systems based on naturally occurring substances include for example hyaluronic acid, also known as hyaluronan. Hyaluronic acid is a naturally occurring mucopolysaccharide consisting of residues of D-glucuronic and N-acetyl-D-glucosamine. Hyaluronic acid is found in the extracellular tissue matrix of vertebrates, including in connective tissues, as well as in synovial fluid and in the vitreous and aqueous humor of the eye. Esterified derivatives of hyaluronic acid have been used to produce microspheres for use in delivery that are biocompatible and biodegradable (see, for example, Cortivo et al., Biomaterials (1991) 12:727-730; EP 517,565; WO 96/29998; Illum et al., J. Controlled Rel. (1994) 29:133-141).

[0345] Both biodegradable and non-biodegradable polymeric matrices may be used to deliver compositions of the present disclosure, and such polymeric matrices may comprise natural or synthetic polymers. Biodegradable matrices are preferred. The period of time over which release occurs is based on selection of the polymer. Typically, release over a period ranging from between a few hours and three to twelve months is most desirable. Exemplary synthetic polymers which may be used to form the biodegradable delivery system include: polymers of lactic acid and glycolic acid, polyamides, polycarbonates, polyalkylenes, polyalkylene glycols, polyalkylene oxides, polyalkylene terepthalates, polyvinyl alcohols, polyvinyl ethers, polyvinyl esters, poly-vinyl halides, polyvinylpyrrolidone, polyglycolides, polysiloxanes, polyanhydrides, polyurethanes and co-polymers thereof, poly(butic acid), poly(valeric acid), alkyl cellulose, hydroxyalkyl celluloses, cellulose ethers, cellulose esters, nitro celluloses, polymers of acrylic and methacrylic esters, methyl cellulose, ethyl cellulose, hydroxypropyl cellulose, hydroxypropyl methyl cellulose, hydroxybutyl methyl cellulose, cellulose acetate, cellulose propionate, cellulose acetate butyrate, cellulose acetate phthalate, carboxylethyl cellulose, cellulose triacetate, cellulose sulphate sodium salt, poly(methyl methacrylate), poly(ethyl methacrylate), poly(butylmethacrylate), poly(isobutyl methacrylate), poly(hexylmethacrylate), poly(isodecyl methacrylate), poly(lauryl methacrylate), poly(phenyl methacrylate), poly(methyl acrylate), poly(isopropyl acrylate), poly(isobutyl acrylate), poly(octadecyl acrylate), polyethylene, polypropylene, poly(ethylene glycol), poly(ethylene oxide), poly(ethylene terephthalate), poly(vinyl alcohols), polyvinyl acetate, poly vinyl chloride, polystyrene and polyvinylpyrrolidone. Exemplary natural polymers include alginate and other polysaccharides including dextran and cellulose, collagen, chemical derivatives thereof (substitutions, additions of chemical groups, for example, alkyl, alkylene, hydroxylations, oxidations, and other modifications routinely made by those skilled in the art), albumin and other hydrophilic proteins, zein and other prolamines and hydrophobic proteins, copolymers and mixtures thereof. In general, these materials degrade either by enzymatic hydrolysis or exposure to water in vivo, by surface or bulk erosion. The polymer optionally is in the form of a hydrogel (see, for example, WO 04/009664, WO 05/087201, Sawhney, et al., Macromolecules, 1993, 26, 581-587) that can absorb up to about 90% of its weight in water and further, optionally is cross-linked with multivalent ions or other polymers.

[0346] Delivery systems also include non-polymer systems that are lipids including sterols such as cholesterol, cholesterol esters and fatty acids or neutral fats such as mono-di- and tri-glycerides; hydrogel release systems; silastic systems; peptide based systems; wax coatings; compressed tablets using conventional binders and excipients; partially fused implants; and the like. Specific examples include, but are not limited to: (a) erosional systems in which the product is contained in a form within a matrix such as those described in U.S. Pat. Nos. 4,452,775, 4,675,189 and 5,736,152 and (b) diffusional systems in which a product permeates at a controlled rate from a polymer such as described in U.S. Pat. Nos. 3,854,480, 5,133,974 and 5,407,686. Liposomes containing the product may be prepared by methods known methods, such as for example (DE 3,218,121; Epstein et al., Proc. Natl. Acad. Sci. USA, 82: 3688-3692 (1985); Hwang et al., Proc. Natl. Acad. Sci. USA, 77: 4030-4034 (1980); EP 52,322; EP 36,676; EP 88,046; EP 143,949; EP 142,641; JP 83-118008; U.S. Pat. Nos. 4,485,045 and 4,544,545; and EP 102,324).

[0347] Alternatively or additionally, the compositions may be administered locally via implantation into the affected area of a membrane, sponge, or other appropriate material on to which a switch disclosed herein has been absorbed or encapsulated. Where an implantation device is used, the device may be implanted into any suitable tissue or organ, and delivery of a switch, nucleic acid, or vector disclosed herein may be directly through the device via bolus, or via continuous administration, or via catheter using continuous infusion.

[0348] A pharmaceutical composition comprising a CAR-EC switch disclosed herein (e.g., a CAR-EC comprising a humanized anti-CD19 antibody, or a CD19 binding fragment thereof, and/or a CAR-EC comprising a GCN4 derivative disclosed herein) may be formulated for inhalation, such as for example, as a dry powder. Inhalation solutions also may be formulated in a liquefied propellant for aerosol delivery. In yet another formulation, solutions may be nebulized. Additional pharmaceutical composition for pulmonary administration include, those described, for example, in WO 94/20069, which discloses pulmonary delivery of chemically modified proteins. For pulmonary delivery, the particle size should be suitable for delivery to the distal lung. For example, the particle size may be from 1 μm to 5 μm; however, larger particles may be used, for example, if each particle is fairly porous.

[0349] Certain formulations containing CAR-EC switches disclosed herein (e.g., the humanized anti-CD19 CAR-EC switches) may be administered orally. Formulations administered in this fashion may be formulated with or without those carriers customarily used in the compounding of solid dosage forms such as tablets and capsules. For example, a capsule may be designed to release the active portion of the formulation at the point in the gastrointestinal tract when bioavailability is maximized and pre-systemic degradation is minimized. Additional agents may be included to facilitate absorption of a selective binding agent. Diluents, flavorings, low melting point waxes, vegetable oils, lubricants, suspending agents, tablet disintegrating agents, and binders also may be employed.

[0350] Another preparation may involve an effective quantity of a CAR-EC switch disclosed herein (e.g., an anti-CD19 CAR-EC such as a humanized anti-CD19 CAR-EC and/or a CAR-EC comprising a GCN4 derivative disclosed herein) in a mixture with non-toxic excipients which are suitable for the manufacture of tablets. By dissolving the tablets in sterile water, or another appropriate vehicle, solutions may be prepared in unit dose form. Suitable excipients include, but are not limited to, inert diluents, such as calcium carbonate, sodium carbonate or bicarbonate, lactose, or calcium phosphate; or binding agents, such as starch, gelatin, or acacia; or lubricating agents such as magnesium stearate, stearic acid, or talc.

[0351] Suitable and/or preferred pharmaceutical formulations may be determined in view of the present disclosure and general knowledge of formulation technology, depending upon the intended route of administration, delivery format, and desired dosage. Regardless of the manner of administration, an effective dose may be calculated according to patient body weight, body surface area, or organ size. Further refinement of the calculations for determining the appropriate dosage for treatment involving each of the formulations described herein are routinely made in the art and is within the ambit of tasks routinely performed in the art. Appropriate dosages may be ascertained through use of appropriate dose-response data.

### V. Targets

[0352] Disclosed herein are chimeric receptors and chimeric receptor switches that interact with a cell surface molecule on a target cell. Generally, binding of the effector cell and the target cell to the switch brings the target cell into proximity with the effector cell sufficiently close for an activity of the effector cell to have an effect on the target cell.

[0353] In some embodiments, the proximity between the target cell and the effector cell is optimized according to a method disclosed in PCT/US2016/027997 or PCT/US2016/027990, each of which is incorporated herein by reference in its entirety.

[0354] For example, in some embodiments, the size of any linker connecting the CAR-ID to the targeting moiety may be modified by increasing or decreasing its length, so as to optimize the proximity between the target cell and the effector cell. Further, the location of the CAR-ID on the targeting moiety may be varied to optimize the proximity between the target cell and the effector cell.

[0355] In various embodiments, when the effector cell (e.g., T cell) and the target cell are bound to the switch, the T cell may produce an immune response that has a cytotoxic effect on the target cell.

[0356] The switches may interact with a plurality of target cells that express CD19. The target cell may be an infected cell. The target cell may be a pathogenically infected cell. The target cell may be a diseased cell. The target cell may be a genetically-modified cell. The target cell may not be a host cell. Further disclosed herein are CAR-EC switches that interact with a molecule on a non-cell target. The non-cell target may be a virus or a portion thereof. The non-cell target may be a fragment of a cell. The non-cell target may be an extracellular matrix component or protein.

[0357] The target cell may be derived from a tissue. The tissue may be selected from brain, esophagus, breast, colon, lung, glia, ovary, uterus, testes, prostate, gastrointestinal tract, bladder, liver, thymus, bone and skin. The target cell may be derived from one or more endocrine glands. Alternatively, or additionally, the target cell may be derived from one or more endocrine glands. The endocrine gland may be a lymph gland, pituitary gland, thyroid gland, parathyroid gland, pancreas, gonad or pineal gland.

[0358] The target cell may be selected from a stem cell, a pluripotent cell, a hematopoietic stem cell or a progenitor cell. The target cell may a circulating cell. The target cell may be an immune cell.

[0359] The target cell may be a cancer stem cell. The target cell may be a cancer cell. The cancer cell may be derived from a tissue. The tissue may be selected from, by way of non-limiting example, a brain, an esophagus, a breast, a colon, a lung, a glia, an ovary, a uterus, a testicle, a prostate, a gastrointestinal tract, a bladder, a liver, a thyroid and skin. The cancer cell may be derived from bone. The cancer cell may be derived from blood. The cancer cell may be derived from a B cell, a T cell, a monocyte, a thrombocyte, a leukocyte, a neutrophil, an eosinophil, a basophil, a lymphocyte, a hematopoietic stem cell or an endothelial cell progenitor. The cancer cell be derived from a CD19-positive B lymphocyte. The cancer cell may be derived from a stem cell. The cancer cell may be derived from a pluripotent cell. The cancer cell may be derived from one or more endocrine glands. The endocrine gland may be a lymph gland, pituitary gland, thyroid gland, parathyroid gland, pancreas, gonad or pineal gland.

[0360] The target cell may be selected from a stem cell, a pluripotent cell, a hematopoietic stem cell or a progenitor cell. The target cell may a circulating cell. The target cell may be an immune cell.

[0361] The target cell may be a cancer stem cell. The target cell may be a cancer cell. The cancer cell may be derived from a tissue. The tissue may be selected from, by way of non-limiting example, a brain, an esophagus, a breast, a colon, a lung, a glia, an ovary, a uterus, a testicle, a prostate, a gastrointestinal tract, a bladder, a liver, a thyroid and skin. The cancer cell may be derived from bone. The cancer cell may be derived from blood. The cancer cell may be derived from a B cell, a T cell, a monocyte, a thrombocyte, a leukocyte, a neutrophil, an eosinophil, a basophil, a lymphocyte, a hematopoietic stem cell or an endothelial cell progenitor. The cancer cell may be derived from a CD19-positive B lymphocyte. The cancer cell may be derived from a stem cell. The cancer cell may be derived from a pluripotent cell. The cancer cell may be derived from one or more endocrine glands. The endocrine gland may be a lymph gland, pituitary gland, thyroid gland, parathyroid gland, pancreas, gonad or pineal gland.

[0362] The cancer cell may be a CD19-positive cell. The cancer cell may be a CD19-positive B lymphocyte. The cancer cell may be a Her2-positive cell. The Her2-positive cell may be a Her2-positive breast cancer cell. The Her2-positive cell may be a Her2-positive pancreatic cancer cell. The cancer cell may be a BCMA-positive cell. The cancer cell may be a BCMA-positive multiple myeloma cell. The cancer cell may be a CS1-positive cell. The CS1-positive cell may be a multiple myeloma cell. The cancer cell may be a EGFRvIII-positive cell. The EGFRvIII-positive cell may be a glioblastoma cell. The cancer cell may be a CD20-positive cell. The cancer cell may be a CD22-positive cell. The cancer cell may be a CD33-positive cell. The CD33-positive cell may be an acute myeloid leukemia cell. The cancer cell may be a CD123-positive cell. The CD123-positive cell may be an acute myeloid leukemia cell. The cancer cell may be a CLL1-positive cell. The CD123-positive cell may be an acute lymphoid leukemia cell. The CLL1-positive cell may be an acute myeloid leukemia cell. The cancer cell may be an acute myeloid leukemia cell that is (i) CD33-positive, (ii) CD123-positive, (iii) CLL1-positive; or (iv) a combination of two or more of (i), (ii) and (iii).

[0363] The cell surface molecule may be an antigen. The antigen may be at least a portion of a surface antigen or a cell surface marker on a cell. The antigen may be a receptor or a co-receptor on a cell. The antigen may refer to a molecule or molecular fragment that may be bound by a major histocompatibility complex (MHC) and presented to a T-cell receptor. The term “antigen” may also refer to an immunogen. The immunogen may provoke an adaptive immune response if injected on its own into a subject. The immunogen may induce an immune response by itself. The antigen may be a superantigen, T-dependent antigen or a T-independent antigen. The antigen may be an exogenous antigen. Exogenous antigens are typically antigens that have entered the body from the outside, for example by inhalation, ingestion, or injection. Some antigens may start out as exogenous antigens, and later become endogenous (for example, intracellular viruses). The antigen may be an endogenous antigen. The endogenous antigen may be an antigen that has been generated within cells as a result of normal cell metabolism, or because of pathogenic infections (e.g., viral, bacterial, fungal, parasitic). The antigen may be an autoantigen. The autoantigen may be a normal protein or complex of proteins (and sometimes DNA or RNA) that is recognized by the immune system of patients suffering from a specific autoimmune disease. These antigens should, under normal conditions, not be the target of the immune system, but, due to genetic and/or environmental factors, the normal immunological tolerance for such an antigen is not present in these patients. The antigen may be present or over-expressed due to a condition or disease. The condition or disease may be a cancer or a leukemia. The condition may be an inflammatory disease or condition. The condition or disease may be a metabolic disease. The condition may be a genetic disorder.

[0364] The cell surface molecule may be an antigen that has been designated as a tumor antigen. Tumor antigens or neoantigens may be antigens that are presented by MHC I or MHC II molecules on the surface of tumor cells. These antigens may sometimes be presented by tumor cells and never by the normal ones. In this case, they are called tumor-specific antigens (TSAs) and, in general, result from a tumor-specific mutation. More common are antigens that are presented by tumor cells and normal cells, and they are called tumor-associated antigens (TAAs). Cytotoxic T lymphocytes that recognize these antigens may be able to destroy the tumor cells before they proliferate or metastasize. Tumor antigens may also be on the surface of the tumor in the form of, for example, a mutated receptor, in which case they may be recognized by B cells. Unless otherwise specified, the terms “tumor antigen,” “tumor specific antigen” and “tumor associated antigen,” are used interchangeably herein.

[0365] The cell surface molecule may be a receptor. The receptor may be an extracellular receptor. The receptor may be a cell surface receptor. By way of non-limiting example, the receptor may bind a hormone, a neurotransmitter, a cytokine, a growth factor or a cell recognition molecule. The receptor may be a transmembrane receptor. The receptor may be an enzyme-linked receptor. The receptor may be a G-protein couple receptor (GPCR). The receptor may be a growth factor receptor. By way of non-limiting example, the growth factor receptor may be selected from an epidermal growth factor receptor, a fibroblast growth factor receptor, a platelet derived growth factor receptor, a nerve growth factor receptor, a transforming growth factor receptor, a bone morphogenic protein growth factor receptor, a hepatocyte growth factor receptor, a vascular endothelial growth factor receptor, a stem cell factor receptor, an insulin growth factor receptor, a somatomedin receptor, an erythropoietin receptor and homologs and fragments thereof. The receptor may be a hormone receptor. The receptor may be an insulin receptor. By way of non-limiting example, the receptor may be selected from an eicosanoid receptor, a prostaglandin receptor, an estrogen receptor, a follicle stimulating hormone receptor, a progesterone receptor, a growth hormone receptor, a gonadotropin-releasing hormone receptor, homologs thereof and fragments thereof. The receptor may be an adrenergic receptor. The receptor may be an integrin. The receptor may be an Eph receptor. The receptor may be a luteinizing hormone receptor. The cell surface molecule may be at least about 50% homologous to a luteinizing hormone receptor. The receptor may be an immune receptor. By way of non-limiting example, the immune receptor may be selected from a pattern recognition receptor, a toll-like receptor, a NOD like receptor, a killer activated receptor, a killer inhibitor receptor, an Fc receptor, a B cell receptor, a complement receptor, a chemokines receptor and a cytokine receptor. By way of non-limiting example, the cytokine receptor may be selected from an interleukin receptor, an interferon receptor, a transforming growth factor receptor, a tumor necrosis factor receptor, a colony stimulating factor receptor, homologs thereof and fragments thereof. The receptor may be a receptor kinase. The receptor kinase may be a tyrosine kinase receptor. The receptor kinase may be a serine kinase receptor. The receptor kinase may be a threonine kinase receptor. By way of non-limiting example, the receptor kinase may activate a signaling protein selected from a Ras, a Raf, a PI3K, a protein kinase A, a protein kinase B, a protein kinase C, an AKT, an AMPK, a phospholipase, homologs thereof and fragments thereof. The receptor kinase may activate a MAPK/ERK signaling pathway. The receptor kinase may activate Jak, Stat or Smad.

[0366] The cell surface molecule may be a non-receptor cell surface protein. The cell surface molecule may be a cluster of differentiation proteins. By way of non-limiting example, the cell surface molecule may be selected from CD34, CD31, CD117, CD45, CD11b, CD15, CD24, CD114, CD182, CD14, CD11a, CD91, CD16, CD3, CD4, CD25, CD8, CD38, CD22, CD61, CD56, CD30, CD13, CLL1, CD33, CD123, CD19, CD20, fragments thereof, and homologs thereof.

[0367] The cell surface molecule may be a molecule that does not comprise a peptide. The cell surface molecule may comprise a lipid. The cell surface molecule may comprise a lipid moiety or a lipid group. The lipid moiety may comprise a sterol. The lipid moiety may comprise a fatty acid. The antigen may comprise a glycolipid. The cell surface molecule may comprise a carbohydrate.

[0368] Disclosed herein are CAR-EC switches comprising (a) a chimeric antigen receptor binding peptidic antigen comprising a peptide from a yeast transcription factor peptide; and (b) a targeting polypeptide. The yeast transcription factor peptide may be a GCN4 peptide. The targeting polypeptide may comprise a targeting antibody or antibody fragment. The targeting antibody or antibody fragment may comprise a heavy chain of an antibody. The targeting antibody or antibody fragment may comprise a light chain of an antibody. The targeting antibody or antibody fragment may comprise a Fab of an antibody. The targeting antibody or antibody fragment may comprise an anti-CD19 antibody or a fragment thereof. The targeting antibody or antibody fragment may comprise an anti-Her2 antibody or a fragment thereof. The targeting antibody or antibody fragment may be selected from an anti-CS1 antibody, an anti-BCMA antibody, an anti-EGFRvIII antibody, an anti-CD20 antibody, an anti-EGFR antibody, an anti-CEA antibody, an anti-CLL1 antibody, an anti-CD33 antibody, an anti CD123 antibody, and fragments thereof.

[0369] Further disclosed herein are CAR-EC switches comprising (a) a CAR binding region comprising a hydrophilic target peptide (HTP) tag; and (b) a targeting polypeptide. The targeting polypeptide may comprise a targeting antibody or antibody fragment. The targeting antibody or antibody fragment may comprise a heavy chain of an antibody. The targeting antibody or antibody fragment may comprise a light chain of an antibody. The targeting antibody or antibody fragment may comprise a Fab of an antibody. The targeting antibody or antibody fragment may comprise an anti-CD19 antibody or a fragment thereof. The targeting antibody or antibody fragment may comprise an anti-Her2 antibody or a fragment thereof. The targeting antibody or antibody fragment may be selected from an anti-CS1 antibody, an anti-BCMA antibody, an anti-EGFRvIII antibody, an anti-CD20 antibody, an anti-EGFR antibody, an anti-CEA antibody, an anti-CLL1 antibody, an anti-CD33 antibody, and anti CD123 antibody, and fragments thereof.

[0370] The target (e.g., CD19) may be present or over-expressed on the cell surface of a target cell. The target (e.g., CD19) may be present or over-expressed due to a disease or condition. The disease or condition may be a cancer or leukemia. The disease or condition may be an inflammatory disease or condition. The disease or condition may be a metabolic disease. The disease or condition may be a genetic disorder.

### VI. Chimeric Receptors

[0371] Disclosed herein are chimeric receptor effector cell switches (CAR-EC) switches that regulate the activities of a cell expressing a chimeric receptor. As used herein, the terms “chimeric receptor” and “chimeric antigen receptor” (CAR) are used interchangeably (despite the fact that the term chimeric “antigen” receptor implies the extracellular portion is an antibody or an antigen-binding portion thereof), as are the terms “chimeric receptor effector cell” and “chimeric antigen receptor effector cell”. The chimeric antigen receptor may comprise an extracellular domain, transmembrane domain and intracellular domain. In some embodiments, the chimeric antigen receptor may comprise an extracellular domain, a hinge, a transmembrane domain and intracellular domain. Thus, the terms “chimeric antigen receptor” and “CAR” may in some embodiments encompass chimeric receptors that do not comprise an antibody extracellular domain and the terms may in some embodiments encompass chimeric receptors comprising an extracellular domain that comprises or consists of an antibody or an antigen binding portion thereof.

[0372] Disclosed herein are CAR-EC switches that regulate the activities of a cell expressing a chimeric antigen receptor (CAR). The present disclosure provides chimeric antigen receptors, the activity of which are regulated by CAR-EC switches. The chimeric antigen receptor may comprise an extracellular domain, transmembrane domain and intracellular domain. The extracellular domain may bind to the CAR-ID (e.g., a GCN4, Flag, K4, or E4 peptide, or a small molecule such as FITC) of the CAR-EC switch.

[0373] The CAR may be humanized to reduce immunogenicity to humans. The CAR may comprise an extracellular domain that is humanized. The humanization may reduce immunogenicity of the CAR to humans while retaining the specificity and affinity of the extracellular domain for the CAR-EC switch. The CAR may be a humanized version of any one of the CAR sequences provided in Table 13 or it may be a humanized version of any one of SEQ ID NOS: 270-289. The CAR may comprise a humanized sequence that is at least 85%, 90%, 95%, 96%, 97%, 98%, or at least 99% identical to any one of the CAR sequences provided in Table 13 or it may comprise a humanized sequence that is at least 85%, 90%, 95%, 96%, 97%, 98%, or at least 99% identical to SEQ ID NOS: 270-289.

TABLE 13
Murine sCAR sequences

| | Seq id | |
|---|---|---|
| Sequence | no | Name |
| MGVPTQLLGLLLLWITDAICDIQMTQSPASLSTSLGETVTIQCQASE | 270. | >1D3_CAR |
| DIYSGLAWYQQKPGKSPQLLIYGASDLQDGVPSRFSGSGSGTQYSLK | | |
| ITSMQTEDEGVYFCQQGLTYPRTFGGGTKLELKGGGGSGGGGSGGGG | | |
| SEVQLQQSGAELVRPGTSVKLSCKVSGDTITFYYMHFVKQRPGQGLE | | |
| WIGRIDPEDESTKYSEKFKNKATLTADTSSNTAYLKLSSLTSEDTAT | | |
| YFCIYGGYYFDYWGQGVMVTVSSIEFMYPPPYLDNERSNGTIIHIKE | | |
| KHLCHTQSSPKLFWALVVVAGVLFCYGLLVTVALCVIWTNSRRNRGG | | |
| QSDYMNMTPRRPGLTRKPYQPYAPARDFAAYRPRAKFSRSAETAANL | | |
| QDPNQLFNELNLGRREEFDVLEKKRARDPEMGGKQQRRRNPQEGVYN | | |
| ALQKDKMAEAYSEIGTKGERRRGKGHDGLFQGLSTATKDTFDALHMQ | | |
| TLAPR | | |
| DAVVTQESALTSSPGETVTLTCRSSTGAVTTSNYASWVQEKPDHLFT | 271. | >IH-1-109 |
| GLIGGTNNRAPGVPARFSGSLIGDKAALTITGAQTEDEAIYFCVLWY | | |
| SDHWVFGGGTKLTVLGGGGGSGGGGSGGGGSGGGGSDVQLQESGPGL | | |
| VAPSQSLSITCTVSGFLLTDYGVNWVRQSPGKGLEWLGVIWGDGITD | | |
| YNSALKSRLSVTKDNSKSQVFLKMNSLQSGDSARYYCVTGLFDYWGQ | | |
| GTTLTVSSIEFMYPPPYLDNERSNGTIIHIKEKHLCHTQSSPKLFWA | | |
| LVVVAGVLFCYGLLVTVALCVIWTNSRRNRGGQSDYMNMTPRRPGLT | | |
| RKPYQPYAPARDFAAYRPRAKFSRSAETAANLQDPNQLFNELNLGRR | | |
| EEFDVLEKKRARDPEMGGKQQRRRNPQEGVYNALQKDKMAEAYSEIG | | |
| TKGERRRGKGHDGLFQGLSTATKDTFDALHMQTLAPR | | |
| DAVVTQESALTSSPGETVTLTCRSSTGAVTTSNYASWVQEKPDHLFT | 272. | >SV-285-064 |
| GLIGGTNNRAPGVPARFSGSLIGDKAALTITGAQTEDEAIYFCVLWY | | |
| SDHWVFGGGTKLTVLGGGGGSGGGGSGGGGSGGGGSDVQLQESGPGL | | |
| VAPSQSLSITCTVSGFLLTDYGVNWVRQSPGKGLEWLGVIWGDGITD | | |
| YNSALKSRLSVTKDNSKSQVFLKMNSLQSGDSARYYCVTGLFDYWGQ | | |
| GTTLTVSSESKYGPPCPPCPFWALVVVAGVLFCYGLLVTVALCVIWT | | |
| NSRRNRGGQSDYMNMTPRRPGLTRKPYQPYAPARDFAAYRPRAKFSR | | |
| SAETAANLQDPNQLFNELNLGRREEFDVLEKKRARDPEMGGKQQRRR | | |
| NPQEGVYNALQKDKMAEAYSEIGTKGERRRGKGHDGLFQGLSTATKD | | |
| TFDALHMQTLAPR | | |
| DAVVTQESALTSSPGETVTLTCRSSTGAVTTSNYASWVQEKPDHLFT | 273. | >SV-319-029 |
| GLIGGTNNRAPGVPARFSGSLIGDKAALTITGAQTEDEAIYFCVLWY | | |
| SDHWVFGGGTKLTVLGGGGGSGGGGSGGGGSGGGGSDVQLQESGPGL | | |
| VAPSQSLSITCTVSGFLLTDYGVNWVRQSPGKGLEWLGVIWGDGITD | | |
| YNSALKSRLSVTKDNSKSQVFLKMNSLQSGDSARYYCVTGLFDYWGQ | | |
| GTTLTVSSESKYGPPCPPCPFWALVVVAGVLFCYGLLVTVALCVIWT | | |
| KWIRKKFPHIFKQPFKKTTGAAQEEDACSCRCPQEEEGGGGGYELRA | | |
| KFSRSAETAANLQDPNQLFNELNLGRREEFDVLEKKRARDPEMGGKQ | | |
| QRRRNPQEGVYNALQKDKMAEAYSEIGTKGERRRGKGHDGLFQGLST | | |
| ATKDTFDALHMQTLAPR | | |
| DAVVTQESALTSSPGETVTLTCRSSTGAVTTSNYASWVQEKPDHLFT | 274. | >SV-319-028 |
| GLIGGTNNRAPGVPARFSGSLIGDKAALTITGAQTEDEAIYFCVLWY | | |
| SDHWVFGGGTKLTVLGGGGGSGGGGSGGGGSGGGGSDVQLQESGPGL | | |
| VAPSQSLSITCTVSGFLLTDYGVNWVRQSPGKGLEWLGVIWGDGITD | | |
| YNSALKSRLSVTKDNSKSQVFLKMNSLQSGDSARYYCVTGLFDYWGQ | | |
| GTTLTVSSESKYGPPCPPCPFWALVVVAGVLFCYGLLVTVALCVIWT | | |
| NSRRNRGGQSDYMNMTPRRPGLTRKPYQPYAPARDFAAYRPKWIRKK | | |
| FPHIFKQPFKKTTGAAQEEDACSCRCPQEEEGGGGGYELRAKFSRSA | | |
| ETAANLQDPNQLFNELNLGRREEFDVLEKKRARDPEMGGKQQRRRNP | | |
| QEGVYNALQKDKMAEAYSEIGTKGERRRGKGHDGLFQGLSTATKDTF | | |
| DALHMQTLAPR | | |
| DAVVTQESALTSSPGETVTLTCRSSTGAVTTSNYASWVQEKPDHLFT | 275. | >SV-319-090 |
| GLIGGTNNRAPGVPARFSGSLIGDKAALTITGAQTEDEAIYFCVLWY | | |
| SDHWVFGGGTKLTVLGGGGGSGGGGSGGGGSGGGGSDVQLQESGPGL | | |
| VAPSQSLSITCTVSGFLLTDYGVNWVRQSPGKGLEWLGVIWGDGITD | | |
| YNSALKSRLSVTKDNSKSQVFLKMNSLQSGDSARYYCVTGLFDYWGQ | | |
| GTTLTVSSESKYGPPCPPCPFWALVVVAGVLFCYGLLVTVALCVIWT | | |
| NSRRNRGGQSDYMNMTPRRPGLTRKPYQPYAPARDFAAYRPRAKFSR | | |
| SAETAANLQDPNQLYNELNLGRREEYDVLEKKRARDPEMGGKQQRRR | | |
| NPQEGVYNALQKDKMAEAYSEIGTKGERRRGKGHDGLYQGLSTATKD | | |
| TYDALHMQTLAPR | | |
| DAVVTQESALTSSPGETVTLTCRSSTGAVTTSNYASWVQEKPDHLFT | 276. | >SV-319-091 |
| GLIGGTNNRAPGVPARFSGSLIGDKAALTITGAQTEDEAIYFCVLWY | | |
| SDHWVFGGGTKLTVLGGGGGSGGGGSGGGGSGGGGSDVQLQESGPGL | | |
| VAPSQSLSITCTVSGFLLTDYGVNWVRQSPGKGLEWLGVIWGDGITD | | |
| YNSALKSRLSVTKDNSKSQVFLKMNSLQSGDSARYYCVTGLFDYWGQ | | |
| GTTLTVSSESKYGPPCPPCPFWALVVVAGVLFCYGLLVTVALCVIWT | | |
| KWIRKKFPHIFKQPFKKTTGAAQEEDACSCRCPQEEEGGGGGYELRA | | |
| KFSRSAETAANLQDPNQLYNELNLGRREEYDVLEKKRARDPEMGGKQ | | |
| QRRRNPQEGVYNALQKDKMAEAYSEIGTKGERRRGKGHDGLYQGLST | | |
| ATKDTYDALHMQTLAPR | | |
| DAVVTQESALTSSPGETVTLTCRSSTGAVTTSNYASWVQEKPDHLFT | 277. | >SV-319-092 |
| GLIGGTNNRAPGVPARFSGSLIGDKAALTITGAQTEDEAIYFCVLWY | | |
| SDHWVFGGGTKLTVLGGGGGSGGGGSGGGGSGGGGSDVQLQESGPGL | | |
| VAPSQSLSITCTVSGFLLTDYGVNWVRQSPGKGLEWLGVIWGDGITD | | |
| YNSALKSRLSVTKDNSKSQVFLKMNSLQSGDSARYYCVTGLFDYWGQ | | |
| GTTLTVSSESKYGPPCPPCPFWALVVVAGVLFCYGLLVTVALCVIWT | | |
| NSRRNRGGQSDYMNMTPRRPGLTRKPYQPYAPARDFAAYRPKWIRKK | | |
| FPHIFKQPFKKTTGAAQEEDACSCRCPQEEEGGGGGYELRAKFSRSA | | |
| ETAANLQDPNQLYNELNLGRREEYDVLEKKRARDPEMGGKQQRRRNP | | |
| QEGVYNALQKDKMAEAYSEIGTKGERRRGKGHDGLYQGLSTATKDTY | | |
| DALHMQTLAPR | | |
| DAVVTQESALTSSPGETVTLTCRSSTGAVTTSNYASWVQEKPDHLFT | 278. | >SV-319-162 |
| GLIGGTNNRAPGVPARFSGSLIGDKAALTITGAQTEDEAIYFCVLWY | | |
| SDHWVFGGGTKLTVLGGGGGSGGGGSGGGGSGGGGSDVQLQESGPGL | | |
| VAPSQSLSITCTVSGFLLTDYGVNWVRQSPGKGLEWLGVIWGDGITD | | |
| YNSALKSRLSVTKDNSKSQVFLKMNSLQSGDSARYYCVTGLFDYWGQ | | |
| GTTLTVSSTTTKPVLRTPSPVHPTGTSQPQRPEDCRPRGSVKGTGLD | | |
| FACDIYIWAPLAGICVALLLSLIITLICNSRRNRGGQSDYMNMTPRR | | |
| PGLTRKPYQPYAPARDFAAYRPRAKFSRSAETAANLQDPNQLFNELN | | |
| LGRREEFDVLEKKRARDPEMGGKQQRRRNPQEGVYNALQKDKMAEAY | | |
| SEIGTKGERRRGKGHDGLFQGLSTATKDTFDALHMQTLAPR | | |
| DAVVTQESALTSSPGETVTLTCRSSTGAVTTSNYASWVQEKPDHLFT | 279. | >SV-1-003 |
| GLIGGTNNRAPGVPARFSGSLIGDKAALTITGAQTEDEAIYFCVLWY | | |
| SDHWVFGGGTKLTVLGGGGGSGGGGSGGGGSGGGGSDVQLQESGPGL | | |
| VAPSQSLSITCTVSGFLLTDYGVNWVRQSPGKGLEWLGVIWGDGITD | | |
| YNSALKSRLSVTKDNSKSQVFLKMNSLQSGDSARYYCVTGLFDYWGQ | | |
| GTTLTVSSTTTKPVLRTPSPVHPTGTSQPQRPEDCRPRGSVKGTGLD | | |
| FACDIYIWAPLAGICVALLLSLIITLICKWIRKKFPHIFKQPFKKTT | | |
| GAAQEEDACSCRCPQEEEGGGGGYELRAKFSRSAETAANLQDPNQLF | | |
| NELNLGRREEFDVLEKKRARDPEMGGKQQRRRNPQEGVYNALQKDKM | | |
| AEAYSEIGTKGERRRGKGHDGLFQGLSTATKDTFDALHMQTLAPR | | |
| DAVVTQESALTSSPGETVTLTCRSSTGAVTTSNYASWVQEKPDHLFT | 280. | >SV-319-163 |
| GLIGGTNNRAPGVPARFSGSLIGDKAALTITGAQTEDEAIYFCVLWY | | |
| SDHWVFGGGTKLTVLGGGGGSGGGGSGGGGSGGGGSDVQLQESGPGL | | |
| VAPSQSLSITCTVSGFLLTDYGVNWVRQSPGKGLEWLGVIWGDGITD | | |
| YNSALKSRLSVTKDNSKSQVFLKMNSLQSGDSARYYCVTGLFDYWGQ | | |
| GTTLTVSSTTTKPVLRTPSPVHPTGTSQPQRPEDCRPRGSVKGTGLD | | |
| FACDIYIWAPLAGICVALLLSLIITLICNSRRNRGGQSDYMNMTPRR | | |
| PGLTRKPYQPYAPARDFAAYRPKWIRKKFPHIFKQPFKKTTGAAQEE | | |
| DACSCRCPQEEEGGGGGYELRAKFSRSAETAANLQDPNQLFNELNLG | | |
| RREEFDVLEKKRARDPEMGGKQQRRRNPQEGVYNALQKDKMAEAYSE | | |
| IGTKGERRRGKGHDGLFQGLSTATKDTFDALHMQTLAPR | | |
| DAVVTQESALTSSPGETVTLTCRSSTGAVTTSNYASWVQEKPDHLFT | 281. | >SV-319-088 |
| GLIGGTNNRAPGVPARFSGSLIGDKAALTITGAQTEDEAIYFCVLWY | | |
| SDHWVFGGGTKLTVLGGGGGSGGGGSGGGGSGGGGSDVQLQESGPGL | | |
| VAPSQSLSITCTVSGFLLTDYGVNWVRQSPGKGLEWLGVIWGDGITD | | |
| YNSALKSRLSVTKDNSKSQVFLKMNSLQSGDSARYYCVTGLFDYWGQ | | |
| GTTLTVSSTTTKPVLRTPSPVHPTGTSQPQRPEDCRPRGSVKGTGLD | | |
| FACDIYIWAPLAGICVALLLSLIITLICNSRRNRGGQSDYMNMTPRR | | |
| PGLTRKPYQPYAPARDFAAYRPRAKFSRSAETAANLQDPNQLYNELN | | |
| LGRREEYDVLEKKRARDPEMGGKQQRRRNPQEGVYNALQKDKMAEAY | | |
| SEIGTKGERRRGKGHDGLYQGLSTATKDTYDALHMQTLAPR | | |
| DAVVTQESALTSSPGETVTLTCRSSTGAVTTSNYASWVQEKPDHLFT | 282. | >SV-1-004 |
| GLIGGTNNRAPGVPARFSGSLIGDKAALTITGAQTEDEAIYFCVLWY | | |
| SDHWVFGGGTKLTVLGGGGGSGGGGSGGGGSGGGGSDVQLQESGPGL | | |
| VAPSQSLSITCTVSGFLLTDYGVNWVRQSPGKGLEWLGVIWGDGITD | | |
| YNSALKSRLSVTKDNSKSQVFLKMNSLQSGDSARYYCVTGLFDYWGQ | | |
| GTTLTVSSTTTKPVLRTPSPVHPTGTSQPQRPEDCRPRGSVKGTGLD | | |
| FACDIYIWAPLAGICVALLLSLIITLICKWIRKKFPHIFKQPFKKTT | | |
| GAAQEEDACSCRCPQEEEGGGGGYELRAKFSRSAETAANLQDPNQLY | | |
| NELNLGRREEYDVLEKKRARDPEMGGKQQRRRNPQEGVYNALQKDKM | | |
| AEAYSEIGTKGERRRGKGHDGLYQGLSTATKDTYDALHMQTLAPR | | |
| DAVVTQESALTSSPGETVTLTCRSSTGAVTTSNYASWVQEKPDHLFT | 283. | >SV-319-089 |
| GLIGGTNNRAPGVPARFSGSLIGDKAALTITGAQTEDEAIYFCVLWY | | |
| SDHWVFGGGTKLTVLGGGGGSGGGGSGGGGSGGGGSDVQLQESGPGL | | |
| VAPSQSLSITCTVSGFLLTDYGVNWVRQSPGKGLEWLGVIWGDGITD | | |
| YNSALKSRLSVTKDNSKSQVFLKMNSLQSGDSARYYCVTGLFDYWGQ | | |
| GTTLTVSSTTTKPVLRTPSPVHPTGTSQPQRPEDCRPRGSVKGTGLD | | |
| FACDIYIWAPLAGICVALLLSLIITLICNSRRNRGGQSDYMNMTPRR | | |
| PGLTRKPYQPYAPARDFAAYRPKWIRKKFPHIFKQPFKKTTGAAQEE | | |
| DACSCRCPQEEEGGGGGYELRAKFSRSAETAANLQDPNQLYNELNLG | | |
| RREEYDVLEKKRARDPEMGGKQQRRRNPQEGVYNALQKDKMAEAYSE | | |
| IGTKGERRRGKGHDGLYQGLSTATKDTYDALHMQTLAPR | | |
| DAVVTQESALTSSPGETVTLTCRSSTGAVTTSNYASWVQEKPDHLFT | 284. | >SV-319-164 |
| GLIGGTNNRAPGVPARFSGSLIGDKAALTITGAQTEDEAIYFCVLWY | | |
| SDHWVFGGGTKLTVLGGGGGSGGGGSGGGGSGGGGSDVQLQESGPGL | | |
| VAPSQSLSITCTVSGFLLTDYGVNWVRQSPGKGLEWLGVIWGDGITD | | |
| YNSALKSRLSVTKDNSKSQVFLKMNSLQSGDSARYYCVTGLFDYWGQ | | |
| GTTLTVSSESKYGPPCPPCPIYIWAPLAGICVALLLSLIITLICNSR | | |
| RNRGGQSDYMNMTPRRPGLTRKPYQPYAPARDFAAYRPRAKFSRSAE | | |
| TAANLQDPNQLFNELNLGRREEFDVLEKKRARDPEMGGKQQRRRNPQ | | |
| EGVYNALQKDKMAEAYSEIGTKGERRRGKGHDGLFQGLSTATKDTFD | | |
| ALHMQTLAPR | | |
| DAVVTQESALTSSPGETVTLTCRSSTGAVTTSNYASWVQEKPDHLFT | 285. | >SV-1-001 |
| GLIGGTNNRAPGVPARFSGSLIGDKAALTITGAQTEDEAIYFCVLWY | | |
| SDHWVFGGGTKLTVLGGGGGSGGGGSGGGGSGGGGSDVQLQESGPGL | | |
| VAPSQSLSITCTVSGFLLTDYGVNWVRQSPGKGLEWLGVIWGDGITD | | |
| YNSALKSRLSVTKDNSKSQVFLKMNSLQSGDSARYYCVTGLFDYWGQ | | |
| GTTLTVSSESKYGPPCPPCPIYIWAPLAGICVALLLSLIITLICKWI | | |
| RKKFPHIFKQPFKKTTGAAQEEDACSCRCPQEEEGGGGGYELRAKFS | | |
| RSAETAANLQDPNQLFNELNLGRREEFDVLEKKRARDPEMGGKQQRR | | |
| RNPQEGVYNALQKDKMAEAYSEIGTKGERRRGKGHDGLFQGLSTATK | | |
| DTFDALHMQTLAPR | | |
| DAVVTQESALTSSPGETVTLTCRSSTGAVTTSNYASWVQEKPDHLFT | 286. | >SV-319-165 |
| GLIGGTNNRAPGVPARFSGSLIGDKAALTITGAQTEDEAIYFCVLWY | | |
| SDHWVFGGGTKLTVLGGGGGSGGGGSGGGGSGGGGSDVQLQESGPGL | | |
| VAPSQSLSITCTVSGFLLTDYGVNWVRQSPGKGLEWLGVIWGDGITD | | |
| YNSALKSRLSVTKDNSKSQVFLKMNSLQSGDSARYYCVTGLFDYWGQ | | |
| GTTLTVSSESKYGPPCPPCPIYIWAPLAGICVALLLSLIITLICNSR | | |
| RNRGGQSDYMNMTPRRPGLTRKPYQPYAPARDFAAYRPKWIRKKFPH | | |
| IFKQPFKKTTGAAQEEDACSCRCPQEEEGGGGGYELRAKFSRSAETA | | |
| ANLQDPNQLFNELNLGRREEFDVLEKKRARDPEMGGKQQRRRNPQEG | | |
| VYNALQKDKMAEAYSEIGTKGERRRGKGHDGLFQGLSTATKDTFDAL | | |
| HMQTLAPR | | |
| DAVVTQESALTSSPGETVTLTCRSSTGAVTTSNYASWVQEKPDHLFT | 287. | >SV-319-166 |
| GLIGGTNNRAPGVPARFSGSLIGDKAALTITGAQTEDEAIYFCVLWY | | |
| SDHWVFGGGTKLTVLGGGGGSGGGGSGGGGSGGGGSDVQLQESGPGL | | |
| VAPSQSLSITCTVSGFLLTDYGVNWVRQSPGKGLEWLGVIWGDGITD | | |
| YNSALKSRLSVTKDNSKSQVFLKMNSLQSGDSARYYCVTGLFDYWGQ | | |
| GTTLTVSSESKYGPPCPPCPIYIWAPLAGICVALLLSLIITLICNSR | | |
| RNRGGQSDYMNMTPRRPGLTRKPYQPYAPARDFAAYRPRAKFSRSAE | | |
| TAANLQDPNQLYNELNLGRREEYDVLEKKRARDPEMGGKQQRRRNPQ | | |
| EGVYNALQKDKMAEAYSEIGTKGERRRGKGHDGLYQGLSTATKDTYD | | |
| ALHMQTLAPR | | |
| DAVVTQESALTSSPGETVTLTCRSSTGAVTTSNYASWVQEKPDHLFT | 288. | >SV-1-002 |
| GLIGGTNNRAPGVPARFSGSLIGDKAALTITGAQTEDEAIYFCVLWY | | |
| SDHWVFGGGTKLTVLGGGGGSGGGGSGGGGSGGGGSDVQLQESGPGL | | |
| VAPSQSLSITCTVSGFLLTDYGVNWVRQSPGKGLEWLGVIWGDGITD | | |
| YNSALKSRLSVTKDNSKSQVFLKMNSLQSGDSARYYCVTGLFDYWGQ | | |
| GTTLTVSSESKYGPPCPPCPIYIWAPLAGICVALLLSLIITLICKWI | | |
| RKKFPHIFKQPFKKTTGAAQEEDACSCRCPQEEEGGGGGYELRAKFS | | |
| RSAETAANLQDPNQLYNELNLGRREEYDVLEKKRARDPEMGGKQQRR | | |
| RNPQEGVYNALQKDKMAEAYSEIGTKGERRRGKGHDGLYQGLSTATK | | |
| DTYDALHMQTLAPR | | |
| DAVVTQESALTSSPGETVTLTCRSSTGAVTTSNYASWVQEKPDHLFT | 289. | >SV-319-167 |
| GLIGGTNNRAPGVPARFSGSLIGDKAALTITGAQTEDEAIYFCVLWY | | |
| SDHWVFGGGTKLTVLGGGGGSGGGGSGGGGSGGGGSDVQLQESGPGL | | |
| VAPSQSLSITCTVSGFLLTDYGVNWVRQSPGKGLEWLGVIWGDGITD | | |
| YNSALKSRLSVTKDNSKSQVFLKMNSLQSGDSARYYCVTGLFDYWGQ | | |
| GTTLTVSSESKYGPPCPPCPIYIWAPLAGICVALLLSLIITLICNSR | | |
| RNRGGQSDYMNMTPRRPGLTRKPYQPYAPARDFAAYRPKWIRKKFPH | | |
| IFKQPFKKTTGAAQEEDACSCRCPQEEEGGGGGYELRAKFSRSAETA | | |
| ANLQDPNQLYNELNLGRREEYDVLEKKRARDPEMGGKQQRRRNPQEG | | |
| VYNALQKDKMAEAYSEIGTKGERRRGKGHDGLYQGLSTATKDTYDAL | | |
| HMQTLAPR | | |

[0374] The extracellular domain may comprise an antibody or antibody fragment that binds to the CAR-ID of the CAR-EC switch (a CAR-antibody). The antibody or antibody fragment may be humanized. The CAR-antibody may comprise at least a portion of an antibody. In some instances, the CAR-antibody is not a full-length antibody. The CAR-antibody may comprise at least a portion of an immunoglobulin or fragment thereof. The immunoglobulin or fragment thereof may be selected from the group consisting of an scFv, a di-scFv, a bi-scFv, a Fab, an Fc, an F(ab′)2, a pFc′, a nanobody, an affibody, a DARPin, a diabody, a camelid, an engineered T cell receptor and a monobody. The immunoglobulin may be selected from the group consisting of an IgA1, an IgA2, an IgD, an IgM, an IgE, an IgG1, an IgG2, an IgG3, and an IgG4. Such immunoglobulin or fragments thereof may be humanized. The CAR-antibody may comprise at least a portion of a single chain variable fragment (scFv). The portion may be an antigen binding portion. The scFv or humanized scFv may comprise or consist of the general structure light chain-linker-heavy chain. The scFv or humanized scFv may comprise or consist of the general structure heavy chain-linker-light chain. The humanized scFv may comprise a humanized VH (variable heavy chain) sequence with non-human (e.g., murine) CDRs grafted onto a human immunoglobulin framework. The framework may be the IGHJ4-59. The humanized VH sequence may comprise murine CDRs transplanted onto the wildtype IGHJ4-59 framework. The humanized VH sequence may comprise murine CDRs transplanted onto a modified IGHJ4-59 framework comprising one or more framework changes (i.e., amino acid modification such as a substitution). The framework changes may be at position 71 (Kabat H71), position 73 (Kabat H73), position 93 (Kabat H90), position 94 (Kabat H91), or combinations of such positions. The humanized scFV may additionally or alternatively comprise a humanized VL (variable light chain) sequence with non-human (e.g., murine) CDRs transplanted onto a human immunoglobulin light chain framework. The light chain framework may be the IGLV7-46 framework. The humanized VL sequence may comprise murine CDRs transplanted onto the wildtype IGLV7-46 framework. The humanized VL sequence may comprise murine CDRs transplanted onto a modified IGLV7-46 framework comprising one or more framework changes (i.e., amino acid modification such as a substitution). The CAR-antibody may be human, fully human, humanized, human engineered, non-human, and/or chimeric antibody.

[0375] The extracellular domain of the CAR may comprise an anti-GCN4 antibody or a GCN4-binding portion thereof. The extracellular domain may comprise a humanized anti-GCN4 scFv (e.g., clone 52SR4, which is a high affinity mutant anti-GCN4 scFv and is described in Zahnd, C., et al., (2004), The Journal of Biological Chemistry 279, 18870-18877 (incorporated herein by reference in its entirety)). The humanized anti-GCN4 scFV (e.g., a humanized version of clone 52SR4) may comprise a humanized light chain, a humanized heavy chain, or a humanized light chain and a humanized heavy chain. The humanized anti-GCN4 (e.g., a humanized version of clone 52SR4) may comprise a humanized VH (variable heavy chain) sequence with non-human (e.g., murine) CDRs transplanted onto a human immunoglobulin framework. The framework may be the IGHJ4-59 framework. The humanized VH sequence may comprise murine CDRs from an anti-GCN4 antibody transplanted onto the wildtype IGHJ4-59 framework. The humanized VH sequence may comprise the CDRs from 52SR4 transplanted onto the wildtype IGHJ4-59 framework. The humanized VH sequence may comprise the CDRs from the 52SR4 antibody transplanted onto a modified IGHJ4-59 framework comprising one or more framework change (i.e., an amino acid modification such as a substitution, deletion or addition). The framework change may affect CDR-H2 conformation, CDR-H3 conformation, improve internal packing of the VH domain and/or may improve binding affinity. The framework change may be at position 71 (Kabat H71), position 73 (Kabat H73), position 93 (Kabat H90), position 94 (Kabat H91), or combinations of such positions. The humanized anti-GCN4 (e.g., a humanized version of clone 52SR4) may additionally or alternatively comprise a humanized VL (variable light chain) sequence with non-human (e.g., murine) CDRs transplanted onto a human immunoglobulin light chain framework. The light chain framework may be the IGLV7-46 framework. The humanized VL sequence may comprise murine CDRs from an anti-GCN4 antibody transplanted onto the wildtype IGLV7-46 framework. The humanized VH sequence may comprise the CDRs from the 52SR4 antibody transplanted onto the wildtype IGLV7-46 framework. The humanized VH sequence may comprise the CDRs from 52SR4 transplanted onto a modified IGLV7-46 framework comprising one or more framework change (i.e., an amino acid modification such as a substitution, deletion or addition). The framework change may result in a sequence with a low propensity for deamidation, may affect CDR conformation, improve internal packing and/or may improve binding affinity. The framework change may be at any position including the positions shown herein, or combinations of such positions. The humanized anti-GCN4 scFV may be encoded by an amino acid sequence selected from SEQ ID NOS: 169-174. The humanized anti-GCN4 scFV may be encoded by a polynucleotide sequence selected from SEQ ID NOS: 175-180. The humanized anti-GCN4 scFV may be encoded by an amino acid sequence that is at least 85%, 90%, 95%, 96%, 97%, 98%, or at least 99% identical to a sequence selected from any one of SEQ ID NOS: 169-174. The humanized anti-GCN4 scFV may be encoded by a polynucleotide sequence that is at least 85%, 90%, 95%, 96%, 97%, 98%, or at least 99% identical to a sequence selected from any one of SEQ ID NOS: 175-180.

[0376] The extracellular domain of the CAR may comprise a humanized scFv encoded by any one of the amino acid sequences provided in Tables 14-16, or any one sequence selected from SEQ ID NOS: 290-388, and 423. The extracellular domain of the CAR may comprise a humanized scFv encoded by an amino acid sequence that is at least 85%, 90%, 95%, 96%, 97%, 98%, or at least 99% identical to a sequence provided in any one of Tables 14-16, or an amino acid sequence that is at least 85%, 90%, 95%, 96%, 97%, 98%, or at least 99% identical to a any one of SEQ ID NOS: 290-388, and 423.

[0377] In certain embodiments, the extracellular domain of the CAR comprises of a sequence that is at least 50%, at least 60%, at least 70%, at least 80%, at least 85%, at least 90%, at least 95%, at least 96%, at least 97%, at least 98%, or at least 99% identical to SEQ ID NO: 322.

[0378] In certain embodiments, the extracellular domain of the CAR consists of a sequence that is at least 50%, at least 60%, at least 70%, at least 80%, at least 85%, at least 90%, at least 95%, at least 96%, at least 97%, at least 98%, or at least 99% identical to SEQ ID NO: 322.

[0379] In certain embodiments, the extracellular domain of the CAR comprises SEQ ID NO: 322. In certain embodiments, the extracellular domain of the CAR consists of SEQ ID NO: 322.

[0380] The CAR may be encoded by any one of the amino acid sequences provided in Table 17. The CAR may be encoded by an amino acid sequence selected from any one of SEQ ID NOS: 389-397. The CAR may be encoded by an amino acid sequence that is at least 85%, 90%, 95%, 96%, 97%, 98%, or at least 99% identical to any one of the amino acid sequences provided in Table 17. The CAR may be encoded by an amino acid sequence that is at least 85%, 90%, 95%, 96%, 97%, 98%, or at least 99% identical to any one of SEQ ID NOS: 389-397.

[0381] In particular embodiments, the CAR may be encoded by the amino acid sequence SEQ ID NO: 411. In particular embodiments, the CAR may be encoded by the polynucleotide sequence SEQ ID NO: 412.

TABLE 14
Humanized sCAR scFV candidates (LH) I

| | Seq id | |
|---|---|---|
| Sequence | no | Name |
| DAVVTQESALTSSPGETVTLTCRSSTGAVTTSNYASWVQEKPDHLFTG | 290. | >52SR4_LH |
| LIGGTNNRAPGVPARFSGSLIGDKAALTITGAQTEDEAIYFCVLWYSD | | |
| HWVFGGGTKLTVLGGGGGSGGGGSGGGGSGGGGSDVQLQESGPGLVAP | | |
| SQSLSITCTVSGFLLTDYGVNWVRQSPGKGLEWLGVIWGDGITDYNSA | | |
| LKSRLSVTKDNSKSQVFLKMNSLQSGDSARYYCVTGLFDYWGQGTTLT | | |
| VSS | | |
| QAVVTQEPSLTVSPGGTVTLTCRSSTGAVTTSNYASWFQQKPGQAPRT | 291. | >L1, H1 |
| LIYGTNNRAPWTPARFSGSLLGGKAALTLSGAQPEDEAEYYCVLWYSD | | |
| HWVFGGGTKLTVLGGGGGSGGGGSGGGGSGGGGSQVQLQESGPGLVKP | | |
| SETLSLTCTVSGFLLTDYGVNWIRQPPGKGLEWIGVIWGDGITDYNPS | | |
| LKSRVTISVDTSKNQFSLKLSSVTAADTAVYYCARGLFDYWGQGTLVT | | |
| VSS | | |
| QAVVTQEPSLTVSPGGTVTLTCGSSTGAVTTSNYASWVQQKPGQAPRG | 292. | >L2, H2 |
| LIGGTNNRAPGVPARFSGSLLGGKAALTISGAQPEDEAEYYCVLWYSD | | |
| HWVFGGGTKLTVLGGGGGSGGGGSGGGGSGGGGSQVQLQESGPGLVKP | | |
| SETLSLTCTVSGFLLTDYGVNWIRQPPGKGLEWIGVIWGDGITDYNPS | | |
| LKSRVTISKDTSKNQFSLKLSSVTAADTAVYYCVTGLFDYWGQGTLVT | | |
| VSS | | |
| QAVVTQEPSLTVSPGGTVTLTCGSSTGAVTTSNYASWVQQKPGQAPRG | 293. | >L2, H2b |
| LIGGTNNRAPGVPARFSGSLLGGKAALTISGAQPEDEAEYYCVLWYSD | | |
| HWVFGGGTKLTVLGGGGGSGGGGSGGGGSGGGGSQVQLQESGPGLVKP | | |
| SETLSLTCTVSGFLLTDYGVNWIRQPPGKGLEWIGVIWGDGITDYNPS | | |
| LKSRVTISKDNSKNQFSLKLSSVTAADTAVYYCVTGLFDYWGQGTLVT | | |
| VSS | | |
| QAVVTQEPSLTVSPGGTVTLTCGSSTGAVTTSNYASWVQQKPGQAPRG | 294. | >L2, H3 |
| LIGGTNNRAPGVPARFSGSLLGGKAALTISGAQPEDEAEYYCVLWYSD | | |
| HWVFGGGTKLTVLGGGGGSGGGGSGGGGSGGGGSQVQLQESGPGLVKP | | |
| SETLSITCTVSGFLLTDYGVNWVRQPPGKGLEWLGVIWGDGITDYNPS | | |
| LKSRLTVSKDTSKNQVSLKMSSLTAADTAVYYCVTGLFDYWGQGTLLT | | |
| VSS | | |
| QAVVTQEPSLTVSPGGTVTLTCGSSTGAVTTSNYASWVQQKPGQAPRG | 295. | >L2, H3b |
| LIGGTNNRAPGVPARFSGSLLGGKAALTISGAQPEDEAEYYCVLWYSD | | |
| HWVFGGGTKLTVLGGGGGSGGGGSGGGGSGGGGSQVQLQESGPGLVKP | | |
| SETLSITCTVSGFLLTDYGVNWVRQPPGKGLEWLGVIWGDGITDYNPS | | |
| LKSRLTVSKDNSKNQVSLKMSSLTAADTAVYYCVTGLFDYWGQGTLLT | | |
| VSS | | |
| QAVVTQEPSLTVSPGGTVTLTCGSSTGAVTTSNYASWVQQKPGQAPRG | 296. | >L2, H4 |
| LIGGTNNRAPGVPARFSGSLLGGKAALTISGAQPEDEAEYYCVLWYSD | | |
| HWVFGGGTKLTVLGGGGGSGGGGSGGGGSGGGGSQVQLQESGPGLVKP | | |
| SETLSITCTVSGFLLTDYGVNWVRQPPGKGLEWLGVIWGDGITDYNPS | | |
| LKSRLTVSKDTSKNQVSLKMSSLTAADTARYYCVTGLFDYWGQGTTLT | | |
| VSS | | |
| QAVVTQEPSLTVSPGGTVTLTCGSSTGAVTTSNYASWVQQKPGQAPRG | 297. | >L2, H4(A87D) |
| LIGGTNNRAPGVPARFSGSLLGGKAALTISGAQPEDEAEYYCVLWYSD | | |
| HWVFGGGTKLTVLGGGGGSGGGGSGGGGSGGGGSQVQLQESGPGLVKP | | |
| SETLSITCTVSGFLLTDYGVNWVRQPPGKGLEWLGVIWGDGITDYNPS | | |
| LKSRLTVSKDTSKNQVSLKMSSLTDADTARYYCVTGLFDYWGQGTTLT | | |
| VSS | | |
| QAVVTQEPSLTVSPGGTVTLTCGSSTGAVTTSNYASWVQQKPGQAPRG | 298. | >L2, H5 |
| LIGGTNNRAPGVPARFSGSLLGGKAALTISGAQPEDEAEYYCVLWYSD | | |
| HWVFGGGTKLTVLGGGGGSGGGGSGGGGSGGGGSQVQLQQSGPGLVKP | | |
| SETLSITCTVSGFLLTDYGVNWVRQPPGKGLEWLGVIWGDGITDYNPS | | |
| LKSRLTVSKDNSKNQVSLKMSSLTAADTAVYYCVTGLFDYWGQGTLLT | | |
| VSS | | |
| QAVVTQEPSLTVSPGGTVTLTCGSSTGAVTTSNYASWVQQKPGQAPRG | 299. | >L2, H6 |
| LIGGTNNRAPGVPARFSGSLLGGKAALTISGAQPEDEAEYYCVLWYSD | | |
| HWVFGGGTKLTVLGGGGGSGGGGSGGGGSGGGGSQVQLQQSGPGLVKP | | |
| SETLSITCTVSGFSLTDYGVNWVRQPPGKGLEWLGVIWGDGSTDYNPS | | |
| LKSRLTVSKDNSKNQVSLKMSSLTAADTAVYYCVTGLFDYWGQGTLLT | | |
| VSS | | |
| QAVVTQEPSLTVSPGGTVTLTCRSSTGAVTTSNYASWVQQKPGQAPRG | 300. | >L2(G23R), |
| LIGGTNNRAPGVPARFSGSLLGGKAALTISGAQPEDEAEYYCVLWYSD | | H3b |
| HWVFGGGTKLTVLGGGGGSGGGGSGGGGSGGGGSQVQLQESGPGLVKP | | |
| SETLSITCTVSGFLLTDYGVNWVRQPPGKGLEWLGVIWGDGITDYNPS | | |
| LKSRLTVSKDNSKNQVSLKMSSLTAADTAVYYCVTGLFDYWGQGTLLT | | |
| VSS | | |
| QAVVTQEPSLTVSPGGTVTLTCRSSTGAVTTSNYASWVQQKPGQAPRG | 301. | >L2(G23R), |
| LIGGTNNRAPGVPARFSGSLLGGKAALTISGAQPEDEAEYYCVLWYSD | | H5 |
| HWVFGGGTKLTVLGGGGGSGGGGSGGGGSGGGGSQVQLQQSGPGLVKP | | |
| SETLSITCTVSGFLLTDYGVNWVRQPPGKGLEWLGVIWGDGITDYNPS | | |
| LKSRLTVSKDNSKNQVSLKMSSLTAADTAVYYCVTGLFDYWGQGTLLT | | |
| VSS | | |
| QAVVTQEPSLTVSPGGTVTLTCRSSTGAVTTSNYASWVQQKPGQAPRG | 302. | >L2(G23R), |
| LIGGTNNRAPGVPARFSGSLLGGKAALTISGAQPEDEAEYYCVLWYSD | | H6 |
| HWVFGGGTKLTVLGGGGGSGGGGSGGGGSGGGGSQVQLQQSGPGLVKP | | |
| SETLSITCTVSGFSLTDYGVNWVRQPPGKGLEWLGVIWGDGSTDYNPS | | |
| LKSRLTVSKDNSKNQVSLKMSSLTAADTAVYYCVTGLFDYWGQGTLLT | | |
| VSS | | |
| QAVVTQEPSLTVSPGGTVTLTCGSSTGAVTTSNYASWVQQKPGQAFRG | 303. | >L3, H2 |
| LIGGTNNRAPGVPARFSGSLLGGKAALTISGAQPEDEAEYYCVLWYSD | | |
| HWVFGGGTKLTVLGGGGGSGGGGSGGGGSGGGGSQVQLQESGPGLVKP | | |
| SETLSLTCTVSGFLLTDYGVNWIRQPPGKGLEWIGVIWGDGITDYNPS | | |
| LKSRVTISKDTSKNQFSLKLSSVTAADTAVYYCVTGLFDYWGQGTLVT | | |
| VSS | | |
| QAVVTQEPSLTVSPGGTVTLTCGSSTGAVTTSNYASWVQQKPGQAFRG | 304. | >L3, H3 |
| LIGGTNNRAPGVPARFSGSLLGGKAALTISGAQPEDEAEYYCVLWYSD | | |
| HWVFGGGTKLTVLGGGGGSGGGGSGGGGSGGGGSQVQLQESGPGLVKP | | |
| SETLSITCTVSGFLLTDYGVNWVRQPPGKGLEWLGVIWGDGITDYNPS | | |
| LKSRLTVSKDTSKNQVSLKMSSLTAADTAVYYCVTGLFDYWGQGTLLT | | |
| VSS | | |
| QAVVTQEPSLTVSPGGTVTLTCGSSTGAVTTSNYASWVQQKPGQAFRG | 305. | >L3, H4(A87D) |
| LIGGTNNRAPGVPARFSGSLLGGKAALTISGAQPEDEAEYYCVLWYSD | | |
| HWVFGGGTKLTVLGGGGGSGGGGSGGGGSGGGGSQVQLQESGPGLVKP | | |
| SETLSITCTVSGFLLTDYGVNWVRQPPGKGLEWLGVIWGDGITDYNPS | | |
| LKSRLTVSKDTSKNQVSLKMSSLTDADTARYYCVTGLFDYWGQGTTLT | | |
| VSS | | |
| QAVVTQEPSLTVSPGGTVTLTCGSSTGAVTTSNYASWVQQKPDHLFRG | 306. | >L4, H2 |
| LIGGTNNRAPGVPARFSGSLLGGKAALTISGAQPEDEAEYYCVLWYSD | | |
| HWVFGGGTKLTVLGGGGGSGGGGSGGGGSGGGGSQVQLQESGPGLVKP | | |
| SETLSLTCTVSGFLLTDYGVNWIRQPPGKGLEWIGVIWGDGITDYNPS | | |
| LKSRVTISKDTSKNQFSLKLSSVTAADTAVYYCVTGLFDYWGQGTLVT | | |
| VSS | | |
| QAVVTQEPSLTVSPGGTVTLTCGSSTGAVTTSNYASWVQQKPDHLFRG | 307. | >L4, H3 |
| LIGGTNNRAPGVPARFSGSLLGGKAALTISGAQPEDEAEYYCVLWYSD | | |
| HWVFGGGTKLTVLGGGGGSGGGGSGGGGSGGGGSQVQLQESGPGLVKP | | |
| SETLSITCTVSGFLLTDYGVNWVRQPPGKGLEWLGVIWGDGITDYNPS | | |
| LKSRLTVSKDTSKNQVSLKMSSLTAADTAVYYCVTGLFDYWGQGTLLT | | |
| VSS | | |
| QAVVTQEPSLTVSPGGTVTLTCGSSTGAVTTSNYASWVQQKPDHLFRG | 308. | >L4, H4 |
| LIGGTNNRAPGVPARFSGSLLGGKAALTISGAQPEDEAEYYCVLWYSD | | |
| HWVFGGGTKLTVLGGGGGSGGGGSGGGGSGGGGSQVQLQESGPGLVKP | | |
| SETLSITCTVSGFLLTDYGVNWVRQPPGKGLEWLGVIWGDGITDYNPS | | |
| LKSRLTVSKDTSKNQVSLKMSSLTAADTARYYCVTGLFDYWGQGTTLT | | |
| VSS | | |
| QAVVTQEPSLTVSPGGTVTLTCGSSTGAVTTSNYASWVQQKPDHLFRG | 309. | >L4, H4(A87D) |
| LIGGTNNRAPGVPARFSGSLLGGKAALTISGAQPEDEAEYYCVLWYSD | | |
| HWVFGGGTKLTVLGGGGGSGGGGSGGGGSGGGGSQVQLQESGPGLVKP | | |
| SETLSITCTVSGFLLTDYGVNWVRQPPGKGLEWLGVIWGDGITDYNPS | | |
| LKSRLTVSKDTSKNQVSLKMSSLTDADTARYYCVTGLFDYWGQGTTLT | | |
| VSS | | |
| QAVVTQEPSLTVSPGGTVTLTCGSSTGAVTTSNYASWVQQKPDHLFRG | 310. | >L4(L67I, G69D), |
| LIGGTNNRAPGVPARFSGSLIGDKAALTISGAQPEDEAEYYCVLWYSD | | H4 |
| HWVFGGGTKLTVLGGGGGSGGGGSGGGGSGGGGSQVQLQESGPGLVKP | | |
| SETLSITCTVSGFLLTDYGVNWVRQPPGKGLEWLGVIWGDGITDYNPS | | |
| LKSRLTVSKDTSKNQVSLKMSSLTAADTARYYCVTGLFDYWGQGTTLT | | |
| VSS | | |
| QAVVTQEPSLTVSPGGTVTLTCRSSTGAVTTSNYASWVQQKPDHLFRG | 311. | >L4(G23R, L67I, |
| LIGGTNNRAPGVPARFSGSLIGDKAALTISGAQPEDEAEYYCVLWYSD | | G69D), |
| HWVFGGGTKLTVLGGGGGSGGGGSGGGGSGGGGSQVQLQESGPGLVKP | | H4 |
| SETLSITCTVSGFLLTDYGVNWVRQPPGKGLEWLGVIWGDGITDYNPS | | |
| LKSRLTVSKDTSKNQVSLKMSSLTAADTARYYCVTGLFDYWGQGTTLT | | |
| VSS | | |
| QAVVTQEPSLTVSPGGTVTLTCRSSTGAVTTSNYASWVQQKPDHLFRG | 312. | >L4(G23R), |
| LIGGTNNRAPGVPARFSGSLLGGKAALTISGAQPEDEAEYYCVLWYSD | | H4 |
| HWVFGGGTKLTVLGGGGGSGGGGSGGGGSGGGGSQVQLQESGPGLVKP | | |
| SETLSITCTVSGFLLTDYGVNWVRQPPGKGLEWLGVIWGDGITDYNPS | | |
| LKSRLTVSKDTSKNQVSLKMSSLTAADTARYYCVTGLFDYWGQGTTLT | | |
| VSS | | |
| QAVVTQEPSLTVSPGGTVTLTCRSSTGAVTTSNYASWVQQKPDHLFRG | 313. | >L4(G23R), |
| LIGGTNNRAPGVPARFSGSLLGGKAALTISGAQPEDEAEYYCVLWYSD | | H4(E6Q) |
| HWVFGGGTKLTVLGGGGGSGGGGSGGGGSGGGGSQVQLQQSGPGLVKP | | |
| SETLSITCTVSGFLLTDYGVNWVRQPPGKGLEWLGVIWGDGITDYNPS | | |
| LKSRLTVSKDTSKNQVSLKMSSLTAADTARYYCVTGLFDYWGQGTTLT | | |
| VSS | | |
| QAVVTQEPSLTVSPGGTVTLTCGSSTGAVTTSNYASWVQEKPDHLFRG | 314. | >L5, H4 |
| LIGGTNNRAPGVPARFSGSLLGGKAALTISGAQPEDEAIYFCVLWYSD | | |
| HWVFGGGTKLTVLGGGGGSGGGGSGGGGSGGGGSQVQLQESGPGLVKP | | |
| SETLSITCTVSGFLLTDYGVNWVRQPPGKGLEWLGVIWGDGITDYNPS | | |
| LKSRLTVSKDTSKNQVSLKMSSLTAADTARYYCVTGLFDYWGQGTTLT | | |
| VSS | | |
| QAVVTQEPSLTVSPGGTVTLTCGSSTGAVTTSNYASWVQEKPDHLFRG | 315. | >L5, H4(E6Q) |
| LIGGTNNRAPGVPARFSGSLLGGKAALTISGAQPEDEAIYFCVLWYSD | | |
| HWVFGGGTKLTVLGGGGGSGGGGSGGGGSGGGGSQVQLQQSGPGLVKP | | |
| SETLSITCTVSGFLLTDYGVNWVRQPPGKGLEWLGVIWGDGITDYNPS | | |
| LKSRLTVSKDTSKNQVSLKMSSLTAADTARYYCVTGLFDYWGQGTTLT | | |
| VSS | | |
| QAVVTQEPSLTVSPGGTVTLTCGSSTGAVTTSNYASWVQEKPDHLFRG | 316. | >L5, H4(A87D) |
| LIGGTNNRAPGVPARFSGSLLGGKAALTISGAQPEDEAIYFCVLWYSD | | |
| HWVFGGGTKLTVLGGGGGSGGGGSGGGGSGGGGSQVQLQESGPGLVKP | | |
| SETLSITCTVSGFLLTDYGVNWVRQPPGKGLEWLGVIWGDGITDYNPS | | |
| LKSRLTVSKDTSKNQVSLKMSSLTDADTARYYCVTGLFDYWGQGTTLT | | |
| VSS | | |
| QAVVTQEPSLTVSPGGTVTLTCGSSTGAVTTSNYASWVQEKPDHLFRG | 317. | >L5, H4(E6Q, |
| LIGGTNNRAPGVPARFSGSLLGGKAALTISGAQPEDEAIYFCVLWYSD | | A87D) |
| HWVFGGGTKLTVLGGGGGSGGGGSGGGGSGGGGSQVQLQQSGPGLVKP | | |
| SETLSITCTVSGFLLTDYGVNWVRQPPGKGLEWLGVIWGDGITDYNPS | | |
| LKSRLTVSKDTSKNQVSLKMSSLTDADTARYYCVTGLFDYWGQGTTLT | | |
| VSS | | |
| QAVVTQEPSLTSSPGGTVTLTCGSSTGAVTTSNYASWVQEKPDHLFRG | 318. | >L5(V12S), |
| LIGGTNNRAPGVPARFSGSLLGGKAALTISGAQPEDEAIYFCVLWYSD | | H4 |
| HWVFGGGTKLTVLGGGGGSGGGGSGGGGSGGGGSQVQLQESGPGLVKP | | |
| SETLSITCTVSGFLLTDYGVNWVRQPPGKGLEWLGVIWGDGITDYNPS | | |
| LKSRLTVSKDTSKNQVSLKMSSLTAADTARYYCVTGLFDYWGQGTTLT | | |
| VSS | | |
| QAVVTQEPSLTSSPGGTVTLTCGSSTGAVTTSNYASWVQEKPDHLFRG | 319. | >L5(V12S), |
| LIGGTNNRAPGVPARFSGSLLGGKAALTISGAQPEDEAIYFCVLWYSD | | H4(A87D) |
| HWVFGGGTKLTVLGGGGGSGGGGSGGGGSGGGGSQVQLQESGPGLVKP | | |
| SETLSITCTVSGFLLTDYGVNWVRQPPGKGLEWLGVIWGDGITDYNPS | | |
| LKSRLTVSKDTSKNQVSLKMSSLTDADTARYYCVTGLFDYWGQGTTLT | | |
| VSS | | |
| QAVVTQEPSLTVSPGGTVTLTCGSSTGAVTTSNYASWVQEKPDHLFRG | 320. | >L5(L109D), |
| LIGGTNNRAPGVPARFSGSLLGGKAALTISGAQPEDEAIYFCVLWYSD | | H4 |
| HWVFGGGTKLTVDGGGGGSGGGGSGGGGSGGGGSQVQLQESGPGLVKP | | |
| SETLSITCTVSGFLLTDYGVNWVRQPPGKGLEWLGVIWGDGITDYNPS | | |
| LKSRLTVSKDTSKNQVSLKMSSLTAADTARYYCVTGLFDYWGQGTTLT | | |
| VSS | | |
| QAVVTQEPSLTVSPGGTVTLTCGSSTGAVTTSNYASWVQEKPDHLFRG | 321. | >L5(L109D), |
| LIGGTNNRAPGVPARFSGSLLGGKAALTISGAQPEDEAIYFCVLWYSD | | H4(A87D) |
| HWVFGGGTKLTVDGGGGGSGGGGSGGGGSGGGGSQVQLQESGPGLVKP | | |
| SETLSITCTVSGFLLTDYGVNWVRQPPGKGLEWLGVIWGDGITDYNPS | | |
| LKSRLTVSKDTSKNQVSLKMSSLTDADTARYYCVTGLFDYWGQGTTLT | | |
| VSS | | |
| QAVVTQEPSLTVSPGGTVTLTCGSSTGAVTTSNYASWVQEKPDHLFRG | 322. | >L5(L109D), |
| LIGGTNNRAPGVPARFSGSLLGGKAALTISGAQPEDEAIYFCVLWYSD | | H4(E6Q, A87D) |
| HWVFGGGTKLTVDGGGGGSGGGGSGGGGSGGGGSQVQLQQSGPGLVKP | | |
| SETLSITCTVSGFLLTDYGVNWVRQPPGKGLEWLGVIWGDGITDYNPS | | |
| LKSRLTVSKDTSKNQVSLKMSSLTDADTARYYCVTGLFDYWGQGTTLT | | |
| VSS | | |
| QAVVTQEPSLTSSPGGTVTLTCGSSTGAVTTSNYASWVQEKPDHLFRG | 323. | >L5(V12S, L109D), |
| LIGGTNNRAPGVPARFSGSLLGGKAALTISGAQPEDEAIYFCVLWYSD | | H4(A87D) |
| HWVFGGGTKLTVDGGGGGSGGGGSGGGGSGGGGSQVQLQESGPGLVKP | | |
| SETLSITCTVSGFLLTDYGVNWVRQPPGKGLEWLGVIWGDGITDYNPS | | |
| LKSRLTVSKDTSKNQVSLKMSSLTDADTARYYCVTGLFDYWGQGTTLT | | |
| VSS | | |
| QAVVTQEPSLTSSPGGTVTLTCGSSTGAVTTSNYASWVQEKPDHLFRG | 324. | >L5(V12S, L109D), |
| LIGGTNNRAPGVPARFSGSLLGGKAALTISGAQPEDEAIYFCVLWYSD | | H4(E6Q, |
| HWVFGGGTKLTVDGGGGGSGGGGSGGGGSGGGGSQVQLQQSGPGLVKP | | A87D) |
| SETLSITCTVSGFLLTDYGVNWVRQPPGKGLEWLGVIWGDGITDYNPS | | |
| LKSRLTVSKDTSKNQVSLKMSSLTDADTARYYCVTGLFDYWGQGTTLT | | |
| VSS | | |
| QAVVTQEPSLTSSPGGTVTLTCGSSTGAVTTSNYASWVQQKPDHLFRG | 325. | >L5(V12S, E40Q, |
| LIGGTNNRAPGVPARFSGSLLGGKAALTISGAQPEDEAIYFCVLWYSD | | L109D), |
| HWVFGGGTKLTVDGGGGGSGGGGSGGGGSGGGGSQVQLQQSGPGLVKP | | H4(E6Q, A87D) |
| SETLSITCTVSGFLLTDYGVNWVRQPPGKGLEWLGVIWGDGITDYNPS | | |
| LKSRLTVSKDTSKNQVSLKMSSLTDADTARYYCVTGLFDYWGQGTTLT | | |
| VSS | | |
| QAVVTQEPSLTSSPGGTVTLTCGSSTGAVTTSNYASWVQEKPDHLFRG | 326. | >L5(V12S, I87E, |
| LIGGTNNRAPGVPARFSGSLLGGKAALTISGAQPEDEAEYFCVLWYSD | | L109D), |
| HWVFGGGTKLTVDGGGGGSGGGGSGGGGSGGGGSQVQLQQSGPGLVKP | | H4(E6Q, A87D) |
| SETLSITCTVSGFLLTDYGVNWVRQPPGKGLEWLGVIWGDGITDYNPS | | |
| LKSRLTVSKDTSKNQVSLKMSSLTDADTARYYCVTGLFDYWGQGTTLT | | |
| VSS | | |
| QAVVTQEPSLTSSPGGTVTLTCGSSTGAVTTSNYASWVQEKPDHLFRG | 327. | >L5(V12S, F89Y, |
| LIGGTNNRAPGVPARFSGSLLGGKAALTISGAQPEDEAIYYCVLWYSD | | L109D), |
| HWVFGGGTKLTVDGGGGGSGGGGSGGGGSGGGGSQVQLQQSGPGLVKP | | H4(E6Q, A87D) |
| SETLSITCTVSGFLLTDYGVNWVRQPPGKGLEWLGVIWGDGITDYNPS | | |
| LKSRLTVSKDTSKNQVSLKMSSLTDADTARYYCVTGLFDYWGQGTTLT | | |
| VSS | | |
| QAVVTQEPSLTSSPGGTVTLTCGSSTGAVTTSNYASWVQQKPDHLFRG | 328. | >L5(V12S, E40Q, |
| LIGGTNNRAPGVPARFSGSLLGGKAALTISGAQPEDEAEYFCVLWYSD | | I87E, L109D), |
| HWVFGGGTKLTVDGGGGGSGGGGSGGGGSGGGGSQVQLQQSGPGLVKP | | H4(E6Q, |
| SETLSITCTVSGFLLTDYGVNWVRQPPGKGLEWLGVIWGDGITDYNPS | | A87D) |
| LKSRLTVSKDTSKNQVSLKMSSLTDADTARYYCVTGLFDYWGQGTTLT | | |
| VSS | | |
| QAVVTQEPSLTSSPGGTVTLTCGSSTGAVTTSNYASWVQQKPDHLFRG | 329. | >L5(V12S, E40Q, |
| LIGGTNNRAPGVPARFSGSLLGGKAALTISGAQPEDEAIYYCVLWYSD | | F89Y, L109D), |
| HWVFGGGTKLTVDGGGGGSGGGGSGGGGSGGGGSQVQLQQSGPGLVKP | | H4(E6Q, |
| SETLSITCTVSGFLLTDYGVNWVRQPPGKGLEWLGVIWGDGITDYNPS | | A87D) |
| LKSRLTVSKDTSKNQVSLKMSSLTDADTARYYCVTGLFDYWGQGTTLT | | |
| VSS | | |
| QAVVTQEPSLTSSPGGTVTLTCGSSTGAVTTSNYASWVQEKPDHLFRG | 330. | >L5(V12S, I87E, |
| LIGGTNNRAPGVPARFSGSLLGGKAALTISGAQPEDEAEYYCVLWYSD | | F89Y, L109D), |
| HWVFGGGTKLTVDGGGGGSGGGGSGGGGSGGGGSQVQLQQSGPGLVKP | | H4(E6Q, |
| SETLSITCTVSGFLLTDYGVNWVRQPPGKGLEWLGVIWGDGITDYNPS | | A87D) |
| LKSRLTVSKDTSKNQVSLKMSSLTDADTARYYCVTGLFDYWGQGTTLT | | |
| VSS | | |
| QAVVTQEPSLTSSPGGTVTLTCGSSTGAVTTSNYASWVQQKPDHLFRG | 331. | >L5(V12S, E40Q, |
| LIGGTNNRAPGVPARFSGSLLGGKAALTISGAQPEDEAEYYCVLWYSD | | I87E, F89Y, |
| HWVFGGGTKLTVDGGGGGSGGGGSGGGGSGGGGSQVQLQQSGPGLVKP | | L109D), |
| SETLSITCTVSGFLLTDYGVNWVRQPPGKGLEWLGVIWGDGITDYNPS | | H4(E6Q, A87D) |
| LKSRLTVSKDTSKNQVSLKMSSLTDADTARYYCVTGLFDYWGQGTTLT | | |
| VSS | | |
| QAVVTQEPSLTVSPGGTVTLTCGSSTGAVTTSNYASWVQEKPDHLFRG | 332. | >L5(L109D), |
| LIGGTNNRAPGVPARFSGSLLGGKAALTISGAQPEDEAIYFCVLWYSD | | muH_52SR4 |
| HWVFGGGTKLTVDGGGGGSGGGGSGGGGSGGGGSDVQLQESGPGLVAP | | |
| SQSLSITCTVSGFLLTDYGVNWVRQSPGKGLEWLGVIWGDGITDYNSA | | |
| LKSRLSVTKDNSKSQVFLKMNSLQSGDSARYYCVTGLFDYWGQGTTLT | | |
| VSS | | |
| QAVVTQEPSLTSSPGGTVTLTCGSSTGAVTTSNYASWVQEKPDHLFRG | 333. | >L5(V12S, L109D), |
| LIGGTNNRAPGVPARFSGSLLGGKAALTISGAQPEDEAIYFCVLWYSD | | muH_52SR4 |
| HWVFGGGTKLTVDGGGGGSGGGGSGGGGSGGGGSDVQLQESGPGLVAP | | |
| SQSLSITCTVSGFLLTDYGVNWVRQSPGKGLEWLGVIWGDGITDYNSA | | |
| LKSRLSVTKDNSKSQVFLKMNSLQSGDSARYYCVTGLFDYWGQGTTLT | | |
| VSS | | |
| QAVVTQEPSLTSSPGGTVTLTCGSSTGAVTTSNYASWVQEKPDHLFRG | 334. | >L5(V12S, L69D, |
| LIGGTNNRAPGVPARFSGSLDGGKAALTISGAQPEDEAIYFCVLWYSD | | L109S), |
| HWVFGGGTKLTVSGGGGGSGGGGSGGGGSGGGGSQVQLQESGPGLVKP | | H4(A87D) |
| SETLSITCTVSGFLLTDYGVNWVRQPPGKGLEWLGVIWGDGITDYNPS | | |
| LKSRLTVSKDTSKNQVSLKMSSLTDADTARYYCVTGLFDYWGQGTTLT | | |
| VSS | | |
| QAVVTQEPSLTSSPGGTVTLTCRSSTGAVTTSNYASWVQEKPDHLFRG | 335. | >L5(V12S, G23R), |
| LIGGTNNRAPGVPARFSGSLLGGKAALTISGAQPEDEAIYFCVLWYSD | | H4 |
| HWVFGGGTKLTVLGGGGGSGGGGSGGGGSGGGGSQVQLQESGPGLVKP | | |
| SETLSITCTVSGFLLTDYGVNWVRQPPGKGLEWLGVIWGDGITDYNPS | | |
| LKSRLTVSKDTSKNQVSLKMSSLTAADTARYYCVTGLFDYWGQGTTLT | | |
| VSS | | |
| QAVVTQEPSLTSSPGGTVTLTCRSSTGAVTTSNYASWVQEKPDHLFRG | 336. | >L5(V12S, G23R), |
| LIGGTNNRAPGVPARFSGSLLGGKAALTISGAQPEDEAIYFCVLWYSD | | H4(A87D) |
| HWVFGGGTKLTVLGGGGGSGGGGSGGGGSGGGGSQVQLQESGPGLVKP | | |
| SETLSITCTVSGFLLTDYGVNWVRQPPGKGLEWLGVIWGDGITDYNPS | | |
| LKSRLTVSKDTSKNQVSLKMSSLTDADTARYYCVTGLFDYWGQGTTLT | | |
| VSS | | |
| QAVVTQEPSLTSSPGGTVTLTCGSSTGAVTTSNYASWVQEKPDHLFRG | 337. | >L5(V12S, L69D), |
| LIGGTNNRAPGVPARFSGSLDGGKAALTISGAQPEDEAIYFCVLWYSD | | H4(A87D) |
| HWVFGGGTKLTVLGGGGGSGGGGSGGGGSGGGGSQVQLQESGPGLVKP | | |
| SETLSITCTVSGFLLTDYGVNWVRQPPGKGLEWLGVIWGDGITDYNPS | | |
| LKSRLTVSKDTSKNQVSLKMSSLTDADTARYYCVTGLFDYWGQGTTLT | | |
| VSS | | |
| QAVVTQEPSLTVSPGGTVTLTCGSSTGAVTTSNYASWVQEKPDHLFRG | 338. | >L5(ΔL109), |
| LIGGTNNRAPGVPARFSGSLLGGKAALTISGAQPEDEAIYFCVLWYSD | | H4 |
| HWVFGGGTKLTVGGGGGSGGGGSGGGGSGGGGSQVQLQESGPGLVKPS | | |
| ETLSITCTVSGFLLTDYGVNWVRQPPGKGLEWLGVIWGDGITDYNPSL | | |
| KSRLTVSKDTSKNQVSLKMSSLTAADTARYYCVTGLFDYWGQGTTLTV | | |
| SS | | |
| QAVVTQEPSLTVSPGGTVTLTCGSSTGAVTTSNYASWVQEKPDHLFRG | 339. | >L5(ΔL109), |
| LIGGTNNRAPGVPARFSGSLLGGKAALTISGAQPEDEAIYFCVLWYSD | | H4(A87D) |
| HWVFGGGTKLTVGGGGGSGGGGSGGGGSGGGGSQVQLQESGPGLVKPS | | |
| ETLSITCTVSGFLLTDYGVNWVRQPPGKGLEWLGVIWGDGITDYNPSL | | |
| KSRLTVSKDTSKNQVSLKMSSLTDADTARYYCVTGLFDYWGQGTTLTV | | |
| SS | | |
| QAVVTQEPSLTSSPGGTVTLTCGSSTGAVTTSNYASWVQEKPDHLFRG | 340. | >L5(V12S, L69D, |
| LIGGTNNRAPGVPARFSGSLDGGKAALTISGAQPEDEAIYFCVLWYSD | | L109S), |
| HWVFGGGTKLTVSGGGGGSGGGGSGGGGSGGGGSDVQLQESGPGLVAP | | muH_52SR4 |
| SQSLSITCTVSGFLLTDYGVNWVRQSPGKGLEWLGVIWGDGITDYNSA | | |
| LKSRLSVTKDNSKSQVFLKMNSLQSGDSARYYCVTGLFDYWGQGTTLT | | |
| VSS | | |
| QAVVTQEPSLTSSPGGTVTLTCGSSTGAVTTSNYASWVQEKPDHLFRG | 341. | >L5(V12S), |
| LIGGTNNRAPGVPARFSGSLLGGKAALTISGAQPEDEAIYFCVLWYSD | | muH_52SR4 |
| HWVFGGGTKLTVLGGGGGSGGGGSGGGGSGGGGSDVQLQESGPGLVAP | | |
| SQSLSITCTVSGFLLTDYGVNWVRQSPGKGLEWLGVIWGDGITDYNSA | | |
| LKSRLSVTKDNSKSQVFLKMNSLQSGDSARYYCVTGLFDYWGQGTTLT | | |
| VSS | | |
| QAVVTQEPSLTSSPGGTVTLTCGSSTGAVTTSNYASWVQEKPDHLFRG | 342. | >L5(V12S), |
| LIGGTNNRAPGVPARFSGSLLGGKAALTISGAQPEDEAIYFCVLWYSD | | H4(E6Q) |
| HWVFGGGTKLTVLGGGGGSGGGGSGGGGSGGGGSQVQLQQSGPGLVKP | | |
| SETLSITCTVSGFLLTDYGVNWVRQPPGKGLEWLGVIWGDGITDYNPS | | |
| LKSRLTVSKDTSKNQVSLKMSSLTAADTARYYCVTGLFDYWGQGTTLT | | |
| VSS | | |
| QAVVTQEPSLTSSPGGTVTLTCGSSTGAVTTSNYASWVQEKPDHLFRG | 343. | >L5(V12S, L69D, |
| LIGGTNNRAPGVPARFSGSLDGGKAALTISGAQPEDEAIYFCVLWYSD | | L109S), |
| HWVFGGGTKLTVSGGGGGSGGGGSGGGGSGGGGSQVQLQESGPGLVKP | | H4(A87S) |
| SETLSITCTVSGFLLTDYGVNWVRQPPGKGLEWLGVIWGDGITDYNPS | | |
| LKSRLTVSKDTSKNQVSLKMSSLTSADTARYYCVTGLFDYWGQGTTLT | | |
| VSS | | |
| QAVVTQEPSLTSSPGGTVTLTCGSSTGAVTTSNYASWVQEKPDHLFRG | 344. | >L5(V12S, L109S), |
| LIGGTNNRAPGVPARFSGSLLGGKAALTISGAQPEDEAIYFCVLWYSD | | H4 |
| HWVFGGGTKLTVSGGGGGSGGGGSGGGGSGGGGSQVQLQESGPGLVKP | | |
| SETLSITCTVSGFLLTDYGVNWVRQPPGKGLEWLGVIWGDGITDYNPS | | |
| LKSRLTVSKDTSKNQVSLKMSSLTAADTARYYCVTGLFDYWGQGTTLT | | |
| VSS | | |
| QAVVTQEPSLTSSPGGTVTLTCGSSTGAVTTSNYASWVQEKPDHLFRG | 345. | >L5(V12S, L69D), |
| LIGGTNNRAPGVPARFSGSLLGGKAALTISGAQPEDEAIYFCVLWYSD | | H4 |
| HWVFGGGTKLTVLGGGGGSGGGGSGGGGSGGGGSQVQLQESGPGLVKP | | |
| SETLSITCTVSGFLLTDYGVNWVRQPPGKGLEWLGVIWGDGITDYNPS | | |
| LKSRLTVSKDTSKNQVSLKMSSLTAADTARYYCVTGLFDYWGQGTTLT | | |
| VSS | | |
| QAVVTQEPSLTSSPGGTVTLTCGSSTGAVTTSNYASWVQEKPDHLFRG | 346. | >L5(V12S), |
| LIGGTNNRAPGVPARFSGSLLGGKAALTISGAQPEDEAIYFCVLWYSD | | H4(A87S) |
| HWVFGGGTKLTVLGGGGGSGGGGSGGGGSGGGGSQVQLQESGPGLVKP | | |
| SETLSITCTVSGFLLTDYGVNWVRQPPGKGLEWLGVIWGDGITDYNPS | | |
| LKSRLTVSKDTSKNQVSLKMSSLTSADTARYYCVTGLFDYWGQGTTLT | | |
| VSS | | |
| QAVVTQEPSLTVSPGGTVTLTCRSSTGAVTTSNYASWVQEKPDHLFRG | 347. | >L5(G23R), |
| LIGGTNNRAPGVPARFSGSLLGGKAALTISGAQPEDEAIYFCVLWYSD | | H4 |
| HWVFGGGTKLTVLGGGGGSGGGGSGGGGSGGGGSQVQLQESGPGLVKP | | |
| SETLSITCTVSGFLLTDYGVNWVRQPPGKGLEWLGVIWGDGITDYNPS | | |
| LKSRLTVSKDTSKNQVSLKMSSLTAADTARYYCVTGLFDYWGQGTTLT | | |
| VSS | | |
| QAVVTQEPSLTVSPGGTVTLTCGSSTGAVTTSNYASWVQEKPDHLFRG | 348. | >L5, H6 |
| LIGGTNNRAPGVPARFSGSLLGGKAALTISGAQPEDEAIYFCVLWYSD | | |
| HWVFGGGTKLTVLGGGGGSGGGGSGGGGSGGGGSQVQLQQSGPGLVKP | | |
| SETLSITCTVSGFSLTDYGVNWVRQPPGKGLEWLGVIWGDGSTDYNPS | | |
| LKSRLTVSKDNSKNQVSLKMSSLTAADTAVYYCVTGLFDYWGQGTLLT | | |
| VSS | | |
| QAVVTQEPSLTVSPGGTVTLTCGSSTGAVTTSNYASWVQEKPDHLFRG | 349. | >L5, H6(N73T) |
| LIGGTNNRAPGVPARFSGSLLGGKAALTISGAQPEDEAIYFCVLWYSD | | |
| HWVFGGGTKLTVLGGGGGSGGGGSGGGGSGGGGSQVQLQQSGPGLVKP | | |
| SETLSITCTVSGFSLTDYGVNWVRQPPGKGLEWLGVIWGDGSTDYNPS | | |
| LKSRLTVSKDTSKNQVSLKMSSLTAADTAVYYCVTGLFDYWGQGTLLT | | |
| VSS | | |
| QAVVTQEPSLTVSPGGTVTLTCGSSTGAVTTSNYASWVQEKPGQAFRG | 350. | >L6(P46F), |
| LIGGTNNRAPGVPARFSGSLLGGKAALTISGAQPEDEAIYFCVLWYSD | | H4 |
| HWVFGGGTKLTVLGGGGGSGGGGSGGGGSGGGGSQVQLQESGPGLVKP | | |
| SETLSITCTVSGFLLTDYGVNWVRQPPGKGLEWLGVIWGDGITDYNPS | | |
| LKSRLTVSKDTSKNQVSLKMSSLTAADTARYYCVTGLFDYWGQGTTLT | | |
| VSS | | |
| QAVVTQEPSLTVSPGGTVTLTCGSSTGAVTTSNYASWVQEKPGQAFRG | 351. | >L6(P46F), |
| LIGGTNNRAPGVPARFSGSLLGGKAALTISGAQPEDEAIYFCVLWYSD | | H4(E6Q) |
| HWVFGGGTKLTVLGGGGGSGGGGSGGGGSGGGGSQVQLQQSGPGLVKP | | |
| SETLSITCTVSGFLLTDYGVNWVRQPPGKGLEWLGVIWGDGITDYNPS | | |
| LKSRLTVSKDTSKNQVSLKMSSLTAADTARYYCVTGLFDYWGQGTTLT | | |
| VSS | | |
| QAVVTQEPSLTVSPGGTVTLTCGSSTGAVTTSNYASWVQEKPGQAPRG | 352. | >L6, H4(A87D) |
| LIGGTNNRAPGVPARFSGSLLGGKAALTISGAQPEDEAIYFCVLWYSD | | |
| HWVFGGGTKLTVLGGGGGSGGGGSGGGGSGGGGSQVQLQESGPGLVKP | | |
| SETLSITCTVSGFLLTDYGVNWVRQPPGKGLEWLGVIWGDGITDYNPS | | |
| LKSRLTVSKDTSKNQVSLKMSSLTDADTARYYCVTGLFDYWGQGTTLT | | |
| VSS | | |
| QAVVTQEPSLTVSPGGTVTLTCGSSTGAVTTSNYASWVQEKPGQAFRG | 353. | >L6(P46F), |
| LIGGTNNRAPGVPARFSGSLLGGKAALTISGAQPEDEAIYFCVLWYSD | | H4(A87D) |
| HWVFGGGTKLTVLGGGGGSGGGGSGGGGSGGGGSQVQLQESGPGLVKP | | |
| SETLSITCTVSGFLLTDYGVNWVRQPPGKGLEWLGVIWGDGITDYNPS | | |
| LKSRLTVSKDTSKNQVSLKMSSLTDADTARYYCVTGLFDYWGQGTTLT | | |
| VSS | | |
| QAVVTQEPSLTVSPGGTVTLTCGSSTGAVTTSNYASWVQEKPGQAPRG | 354. | >L6, H6 |
| LIGGTNNRAPGVPARFSGSLLGGKAALTISGAQPEDEAIYFCVLWYSD | | |
| HWVFGGGTKLTVLGGGGGSGGGGSGGGGSGGGGSQVQLQQSGPGLVKP | | |
| SETLSITCTVSGFSLTDYGVNWVRQPPGKGLEWLGVIWGDGSTDYNPS | | |
| LKSRLTVSKDNSKNQVSLKMSSLTAADTAVYYCVTGLFDYWGQGTLLT | | |
| VSS | | |
| DAVVTQESALTTSPGETVTLTCRSSTGAVTTSNYANWVQEKPDHLFTG | 355. | >c11 |
| LIGGTNNRAPGVPARFSGSLIGDKAALTITGAQTEDEAIYFCALWYSN | | |
| HWVFGGGTKLTVLGGGGGSGGGGSGGGGSGGGGSDVQLQESGPGLVAP | | |
| SQSLSITCTVSGFSLTDYGVNWVRQSPGKGLEWLGVIWGDGITDYNSA | | |
| LKSRLSVTKDNSKSQVFLKMNSLQSGDSARYYCVTGLFDYWGQGTTLT | | |
| VSS | | |
| DAVVTQESALTSSPGETVTLTCRSSTGAVTTSNYASWVQEKPDHLFTG | 356. | >muL_52SR4, |
| LIGGTNNRAPGVPARFSGSLIGDKAALTITGAQTEDEAIYFCVLWYSD | | H4(A87D) |
| HWVFGGGTKLTVLGGGGGSGGGGSGGGGSGGGGSQVQLQESGPGLVKP | | |
| SETLSITCTVSGFLLTDYGVNWVRQPPGKGLEWLGVIWGDGITDYNPS | | |
| LKSRLTVSKDTSKNQVSLKMSSLTDADTARYYCVTGLFDYWGQGTTLT | | |
| VSS | | |
| DAVVTQESALTSSPGETVTLTCRSSTGAVTTSNYASWVQEKPDHLFTG | 357. | >muL_52SR4, |
| LIGGTNNRAPGVPARFSGSLIGDKAALTITGAQTEDEAIYFCVLWYSD | | H4(E6Q, A87D) |
| HWVFGGGTKLTVLGGGGGSGGGGSGGGGSGGGGSQVQLQQSGPGLVKP | | |
| SETLSITCTVSGFLLTDYGVNWVRQPPGKGLEWLGVIWGDGITDYNPS | | |
| LKSRLTVSKDTSKNQVSLKMSSLTDADTARYYCVTGLFDYWGQGTTLT | | |
| VSS | | |
| DAVVTQESALTSSPGETVTLTCRSSTGAVTTSNYASWVQEKPDHLFTG | 358. | >muL_52SR4, |
| LIGGTNNRAPGVPARFSGSLIGDKAALTITGAQTEDEAIYFCVLWYSD | | H4(A87S) |
| HWVFGGGTKLTVLGGGGGSGGGGSGGGGSGGGGSQVQLQESGPGLVKP | | |
| SETLSITCTVSGFLLTDYGVNWVRQPPGKGLEWLGVIWGDGITDYNPS | | |
| LKSRLTVSKDTSKNQVSLKMSSLTSADTARYYCVTGLFDYWGQGTTLT | | |
| VSS | | |
| DAVVTQESALTSSPGETVTLTCRSSTGAVTTSNYASWVQEKPDHLFTG | 359. | >muL_52SR4, |
| LIGGTNNRAPGVPARFSGSLIGDKAALTITGAQTEDEAIYFCVLWYSD | | H4 |
| HWVFGGGTKLTVLGGGGGSGGGGSGGGGSGGGGSQVQLQESGPGLVKP | | |
| SETLSITCTVSGFLLTDYGVNWVRQPPGKGLEWLGVIWGDGITDYNPS | | |
| LKSRLTVSKDTSKNQVSLKMSSLTAADTARYYCVTGLFDYWGQGTTLT | | |
| VSS | | |

TABLE 15
Humanized sCAR scFV candidates (HL) II

| | Seq id | |
|---|---|---|
| Sequence | no | Name |
| QVQLQESGPGLVKPSETLSITCTVSGFLLTDYGVNWVRQPPGKGLEWL | 360. | >H4, L5 |
| GVIWGDGITDYNPSLKSRLTVSKDTSKNQVSLKMSSLTAADTARYYCV | | |
| TGLFDYWGQGTTLTVSSGGGGSGGGGSGGGGSGGGGSQAVVTQEPSLT | | |
| VSPGGTVTLTCGSSTGAVTTSNYASWVQEKPDHLFRGLIGGTNNRAPG | | |
| VPARFSGSLLGGKAALTISGAQPEDEAIYFCVLWYSDHWVFGGGTKLT | | |
| VLG | | |
| QVQLQESGPGLVKPSETLSITCTVSGFLLTDYGVNWVRQPPGKGLEWL | 423. | >H4, L5(V12S) |
| GVIWGDGITDYNPSLKSRLTVSKDTSKNQVSLKMSSLTAADTARYYCV | | |
| TGLFDYWGQGTTLTVSSGGGGSGGGGSGGGGSGGGGSQAVVTQEPSLT | | |
| SSPGGTVTLTCGSSTGAVTTSNYASWVQEKPDHLFRGLIGGTNNRAPG | | |
| VPARFSGSLLGGKAALTISGAQPEDEAIYFCVLWYSDHWVFGGGTKLT | | |
| VLG | | |
| QVQLQQSGPGLVKPSETLSITCTVSGFLLTDYGVNWVRQPPGKGLEWL | 361. | >H4(E6Q, A87S), |
| GVIWGDGITDYNPSLKSRLTVSKDTSKNQVSLKMSSLTSADTARYYCV | | L5 |
| TGLFDYWGQGTTLTVSSGGGGSGGGGSGGGGSGGGGSQAVVTQEPSLT | | |
| VSPGGTVTLTCGSSTGAVTTSNYASWVQEKPDHLFRGLIGGTNNRAPG | | |
| VPARFSGSLLGGKAALTISGAQPEDEAIYFCVLWYSDHWVFGGGTKLT | | |
| VLG | | |
| QVQLQQSGPGLVKPSETLSITCTVSGFLLTDYGVNWVRQPPGKGLEWL | 362. | >H4(E6Q, A87S), |
| GVIWGDGITDYNPSLKSRLTVSKDTSKNQVSLKMSSLTSADTARYYCV | | L5(G23R) |
| TGLFDYWGQGTTLTVSSGGGGSGGGGSGGGGSGGGGSQAVVTQEPSLT | | |
| VSPGGTVTLTCRSSTGAVTTSNYASWVQEKPDHLFRGLIGGTNNRAPG | | |
| VPARFSGSLLGGKAALTISGAQPEDEAIYFCVLWYSDHWVFGGGTKLT | | |
| VLG | | |
| QVQLQQSGPGLVKPSETLSITCTVSGFSLTDYGVNWVRQPPGKGLEWL | 363. | >H6, L2 |
| GVIWGDGSTDYNPSLKSRLTVSKDNSKNQVSLKMSSLTAADTAVYYCV | | |
| TGLFDYWGQGTLLTVSSGGGGSGGGGSGGGGSGGGGSQAVVTQEPSLT | | |
| VSPGGTVTLTCGSSTGAVTTSNYASWVQQKPGQAPRGLIGGTNNRAPG | | |
| VPARFSGSLLGGKAALTISGAQPEDEAEYYCVLWYSDHWVFGGGTKLT | | |
| VLG | | |
| QVQLQESGPGLVKPSETLSITCTVSGFLLTDYGVNWVRQPPGKGLEWL | 364. | >H3b, L2 |
| GVIWGDGITDYNPSLKSRLTVSKDNSKNQVSLKMSSLTAADTAVYYCV | | |
| TGLFDYWGQGTLLTVSSGGGGSGGGGSGGGGSGGGGSQAVVTQEPSLT | | |
| VSPGGTVTLTCGSSTGAVTTSNYASWVQQKPGQAPRGLIGGTNNRAPG | | |
| VPARFSGSLLGGKAALTISGAQPEDEAEYYCVLWYSDHWVFGGGTKLT | | |
| VLG | | |
| QVQLQQSGPGLVKPSETLSITCTVSGFLLTDYGVNWVRQPPGKGLEWL | 365. | >H5, L2 |
| GVIWGDGITDYNPSLKSRLTVSKDNSKNQVSLKMSSLTAADTAVYYCV | | |
| TGLFDYWGQGTLLTVSSGGGGSGGGGSGGGGSGGGGSQAVVTQEPSLT | | |
| VSPGGTVTLTCGSSTGAVTTSNYASWVQQKPGQAPRGLIGGTNNRAPG | | |
| VPARFSGSLLGGKAALTISGAQPEDEAEYYCVLWYSDHWVFGGGTKLT | | |
| VLG | | |
| QVQLQESGPGLVKPSETLSITCTVSGFLLTDYGVNWVRQPPGKGLEWL | 366. | >H4, L5(G23R) |
| GVIWGDGITDYNPSLKSRLTVSKDTSKNQVSLKMSSLTAADTARYYCV | | |
| TGLFDYWGQGTTLTVSSGGGGSGGGGSGGGGSGGGGSQAVVTQEPSLT | | |
| VSPGGTVTLTCRSSTGAVTTSNYASWVQEKPDHLFRGLIGGTNNRAPG | | |
| VPARFSGSLLGGKAALTISGAQPEDEAIYFCVLWYSDHWVFGGGTKLT | | |
| VLG | | |
| QVQLQQSGPGLVKPSETLSITCTVSGFSLTDYGVNWVRQPPGKGLEWL | 367. | >H6, L2(G23R) |
| GVIWGDGSTDYNPSLKSRLTVSKDNSKNQVSLKMSSLTAADTAVYYCV | | |
| TGLFDYWGQGTLLTVSSGGGGSGGGGSGGGGSGGGGSQAVVTQEPSLT | | |
| VSPGGTVTLTCRSSTGAVTTSNYASWVQQKPGQAPRGLIGGTNNRAPG | | |
| VPARFSGSLLGGKAALTISGAQPEDEAEYYCVLWYSDHWVFGGGTKLT | | |
| VLG | | |
| QVQLQESGPGLVKPSETLSITCTVSGFLLTDYGVNWVRQPPGKGLEWL | 368. | >H3b, L2(G23R)* |
| GVIWGDGITDYNPSLKSRLTVSKDNSKNQVSLKMSSLTAADTAVYYCV | | |
| TGLFDYWGQGTLLTVSSGGGGGSGGGGSGGGGSGGGGSQAVVTQEPSL | | |
| TVSPGGTVTLTCRSSTGAVTTSNYASWVQQKPGQAPRGLIGGTNNRAP | | |
| GVPARFSGSLLGGKAALTISGAQPEDEAEYYCVLWYSDHWVFGGGTKL | | |
| TVL | | |
| QVQLQQSGPGLVKPSETLSITCTVSGFLLTDYGVNWVRQPPGKGLEWL | 369. | >H5, L2(G23R)* |
| GVIWGDGITDYNPSLKSRLTVSKDNSKNQVSLKMSSLTAADTAVYYCV | | |
| TGLFDYWGQGTLLTVSSGGGGGSGGGGSGGGGSGGGGSQAVVTQEPSL | | |
| TVSPGGTVTLTCRSSTGAVTTSNYASWVQQKPGQAPRGLIGGTNNRAP | | |
| GVPARFSGSLLGGKAALTISGAQPEDEAEYYCVLWYSDHWVFGGGTKL | | |
| TVL | | |
| QVQLQESGPGLVKPSETLSITCTVSGFLLTDYGVNWVRQPPGKGLEWL | 370. | >H4(A87S), |
| GVIWGDGITDYNPSLKSRLTVSKDTSKNQVSLKMSSLTSADTARYYCV | | L5(V12S, L69D, |
| TGLFDYWGQGTTLTVSSGGGGSGGGGSGGGGSGGGGSQAVVTQEPSLT | | L109S) |
| SSPGGTVTLTCGSSTGAVTTSNYASWVQEKPDHLFRGLIGGTNNRAPG | | |
| VPARFSGSLDGGKAALTISGAQPEDEAIYFCVLWYSDHWVFGGGTKLT | | |
| VSG | | |
| QVQLQQSGPGLVKPSETLSITCTVSGFLLTDYGVNWVRQPPGKGLEWL | 371. | >H4(E6Q), L5 |
| GVIWGDGITDYNPSLKSRLTVSKDTSKNQVSLKMSSLTAADTARYYCV | | |
| TGLFDYWGQGTTLTVSSGGGGSGGGGSGGGGSGGGGSQAVVTQEPSLT | | |
| VSPGGTVTLTCGSSTGAVTTSNYASWVQEKPDHLFRGLIGGTNNRAPG | | |
| VPARFSGSLLGGKAALTISGAQPEDEAIYFCVLWYSDHWVFGGGTKLT | | |
| VLG | | |
| QVQLQQSGPGLVKPSETLSITCTVSGFLLTDYGVNWVRQPPGKGLEWL | 372. | >H4(E6Q), L5 |
| GVIWGDGITDYNPSLKSRLTVSKDTSKNQVSLKMSSLTAADTARYYCV | | (L109D) |
| TGLFDYWGQGTTLTVSSGGGGSGGGGSGGGGSGGGGSQAVVTQEPSLT | | |
| VSPGGTVTLTCGSSTGAVTTSNYASWVQEKPDHLFRGLIGGTNNRAPG | | |
| VPARFSGSLLGGKAALTISGAQPEDEAIYFCVLWYSDHWVFGGGTKLT | | |
| VDG | | |
| DVQLQESGPGLVAPSQSLSITCTVSGFLLTDYGVNWVRQSPGKGLEWL | 373. | >52SR4_HL |
| GVIWGDGITDYNSALKSRLSVTKDNSKSQVFLKMNSLQSGDSARYYCV | | |
| TGLFDYWGQGTTLTVSSGGGGSGGGGSGGGGSGGGGSDAVVTQESALT | | |
| SSPGETVTLTCRSSTGAVTTSNYASWVQEKPDHLFTGLIGGTNNRAPG | | |
| VPARFSGSLIGDKAALTITGAQTEDEAIYFCVLWYSDHWVFGGGTKLT | | |
| VLG | | |
| QVQLQQSGPGLVKPSETLSITCTVSGFLLTDYGVNWVRQPPGKGLEWL | 374. | >H4(E6Q), muL_52SR4 |
| GVIWGDGITDYNPSLKSRLTVSKDTSKNQVSLKMSSLTAADTARYYCV | | |
| TGLFDYWGQGTTLTVSSGGGGSGGGGSGGGGSGGGGSDAVVTQESALT | | |
| SSPGETVTLTCRSSTGAVTTSNYASWVQEKPDHLFTGLIGGTNNRAPG | | |
| VPARFSGSLIGDKAALTITGAQTEDEAIYFCVLWYSDHWVFGGGTKLT | | |
| VLG | | |
| DVQLQESGPGLVAPSQSLSITCTVSGFLLTDYGVNWVRQSPGKGLEWL | 375. | >muH_52SR4, |
| GVIWGDGITDYNSALKSRLSVTKDNSKSQVFLKMNSLQSGDSARYYCV | | L5 |
| TGLFDYWGQGTTLTVSSGGGGSGGGGSGGGGSGGGGSQAVVTQEPSLT | | |
| VSPGGTVTLTCGSSTGAVTTSNYASWVQEKPDHLFRGLIGGTNNRAPG | | |
| VPARFSGSLLGGKAALTISGAQPEDEAIYFCVLWYSDHWVFGGGTKLT | | |
| VLG | | |

TABLE 16
Humanized sCAR scFV candidates omega) III

| | Seq id | |
|---|---|---|
| Sequence | no | Name |
| DIVMTQSPSSLSASVGDRVTITCRSSTGAVTTSNYASWVQEKPGKLFK | 376. | >Lambda |
| GLIGGTNNRAPGVPSRFSGSLIGDKATLTISSLQPEDFATYFCALWYS | | |
| NHWVFGQGTKVELKRGGGGGSGGGGSGGGGSGGGGSEVKLLESGGGLV | | |
| QPGGSLKLSCAVSGFSLTDYGVNWVRQAPGRGLEWIGVIWGDGITDYN | | |
| SALKDRFIISKDNGKNTVYLQMSKVRSDDTALYYCVTGLFDYWGQGTL | | |
| VTVSS | | |
| DIVMTQSPSSLSASVGDRVTITCRSSTGAVTTSNYASWVQEKPGKLFK | 377. | >Omega |
| GLIGGTNNRAPGVPSRFSGSLIGDKATLTISSLQPEDFATYFCALWYS | | |
| NHWVFGQGTKVELKRGGGGGSGGGGSGGGGSGGGGSEVKLLESGGGLV | | |
| QPGGSLKLSCAVSGFSLTDYGVNWVRQAPGRGLEWIGVIWGDGITDYN | | |
| SALKDRFIISKDDCENTVYLQMSKVRSDDTALYYCVTGLFDYWGQGTL | | |
| VTVSS | | |
| DIVMTQSPSSLSASVGDRVTITCRSSTGAVTTSNYASWVQEKPGKLFK | 378. | >Omega_m3 |
| GLIGGTNNRAPGVPSRFSGSLIGDKATLTISSLQPEDFATYYCALWYS | | |
| NHWVFGQGTKVELKRGGGGGSGGGGSGGGGSGGGGSEVKLLESGGGLV | | |
| QPGGSLKLSCAVSGFSLTDYGVNWVRQAPGRGLEWIGVIWGDGTTDYN | | |
| SALKDRFIISKDDCENTVYLQMSKVRSDDTALYYCVTGLFDYWGQGTL | | |
| VTVSS | | |
| DIVMTQSPSSLSASVGDRVTITCRSSTGAVTTSNYASWVQEKPGKLFK | 379. | >Omega_m3S |
| GLIGGTNNRAPGVPSRFSGSLIGDKATLTISSLQPEDFATYYCALWYS | | |
| NHWVFGQGTKVELKRGGGGGSGGGGSGGGGSGGGGSEVKLLESGGGLV | | |
| QPGGSLKLSCAVSGFSLTDYGVNWVRQAPGRGLEWIGVIWGDGTTDYN | | |
| SALKDRFIISKDDSENTVYLQMSKVRSDDTALYYCVTGLFDYWGQGTL | | |
| VTVSS | | |
| DIQMTQSPSSLSASVGDRVTITCRSSTGAVTTSNYASWVQQKPGKAFK | 380. | >Omega2 |
| GLIGGTNNRAPGVPSRFSGSGSGTDATLTISSLQPEDFATYYCALWYS | | |
| NHWVFGQGTKVELKGGGGSGGGGSGGGGSSGGGSEVQLVESGGGLVQP | | |
| GGSLRLSCAVSGFSLTDYGVNWVRQAPGKGLEWIGVIWGDGTTDYADS | | |
| LKGRFTISKDDSKNTVYLQMNSVRAEDTAVYYCVTGLFDYWGQGTLVT | | |
| VSS | | |
| DIQMTQSPSSLSASVGDRVTITCRSSTGAVTTSNYASWVQQKPGKAFK | 381. | >Omega3 |
| GLIGGTNNRAPGVPSRFSGSLIGDKATLTISSLQPEDFATYYCALWYS | | |
| NHWVFGQGTKVELKGGGGSGGGGSGGGGSSGGGSEVQLVESGGGLVQP | | |
| GGSLRLSCAVSGFSLTDYGVNWVRQAPGKGLEWIGVIWGDGTTDYADS | | |
| LKGRFTISKDDSKNTVYLQMNSVRAEDTAVYYCVTGLFDYWGQGTLVT | | |
| VSS | | |
| DIQMTQSPSSLSASVGDRVTITCRSSTGAVTTSNYASWVQQKPGKAFK | 382. | >Omega4 |
| GLIGGTNNRAPGVPSRFSGSLLGGKATLTISSLQPEDFATYYCALWYS | | |
| NHWVFGQGTKVELKGGGGSGGGGSGGGGSSGGGSEVQLVESGGGLVQP | | |
| GGSLRLSCAVSGFSLTDYGVNWVRQAPGKGLEWIGVIWGDGTTDYADS | | |
| LKGRFTISKDDSKNTVYLQMNSVRAEDTAVYYCVTGLFDYWGQGTLVT | | |
| VSS | | |
| DIQMTQSPSSLSASVGDRVTITCRSSTGAVTTSNYASWVQQKPGKAFK | 383. | >Omega5 |
| GLIGGTNNRAPGVPSRFSGSLSGGKATLTISSLQPEDFATYYCALWYS | | |
| NHWVFGQGTKVELKGGGGSGGGGSGGGGSSGGGSEVQLVESGGGLVQP | | |
| GGSLRLSCAVSGFSLTDYGVNWVRQAPGKGLEWIGVIWGDGTTDYADS | | |
| LKGRFTISKDDSKNTVYLQMNSVRAEDTAVYYCVTGLFDYWGQGTLVT | | |
| VSS | | |
| DIQMTQSPSSLSASVGDRVTITCRSSTGAVTTSNYASWVQQKPGKAFK | 384. | >Omega6 |
| GLIGGTNNRAPGVPSRFSGSGSGTDATLTISSLQPEDFATYYCALWYS | | |
| NHWVFGQGTKVELKGGGGSGGGGSGGGGSSGGGSEVQLVESGGGLVQP | | |
| GGSLRLSCAVSGFSLTDYGVNWVRQAPGKGLEWLGVIWGDGTTDYADS | | |
| LKGRFTISKDNSKNTVYLQMNSLRAEDTAVYYCVTGLFDYWGQGTLLT | | |
| VSS | | |
| DIQMTQSPSSLSASVGDRVTITCRSSTGAVTTSNYASWVQQKPGKAFK | 385. | >Omega7 |
| GLIGGTNNRAPGVPSRFSGSLIGDKATLTISSLQPEDFATYYCALWYS | | |
| NHWVFGQGTKVELKGGGGSGGGGSGGGGSSGGGSEVQLVESGGGLVQP | | |
| GGSLRLSCAVSGFSLTDYGVNWVRQAPGKGLEWLGVIWGDGTTDYADS | | |
| LKGRFTISKDNSKNTVYLQMNSLRAEDTAVYYCVTGLFDYWGQGTLLT | | |
| VSS | | |
| DIQMTQSPSSLSASVGDRVTITCRSSTGAVTTSNYASWVQQKPGKAFK | 386. | >Omega8 |
| GLIGGTNNRAPGVPSRFSGSLLGGKATLTISSLQPEDFATYYCALWYS | | |
| NHWVFGQGTKVELKGGGGSGGGGSGGGGSSGGGSEVQLVESGGGLVQP | | |
| GGSLRLSCAVSGFSLTDYGVNWVRQAPGKGLEWLGVIWGDGTTDYADS | | |
| LKGRFTISKDNSKNTVYLQMNSLRAEDTAVYYCVTGLFDYWGQGTLLT | | |
| VSS | | |
| DIQMTQSPSSLSASVGDRVTITCRSSTGAVTTSNYASWVQQKPGKAFK | 387. | >Omega9 |
| GLIGGTNNRAPGVPSRFSGSLSGGKATLTISSLQPEDFATYYCALWYS | | |
| NHWVFGQGTKVELKGGGGSGGGGSGGGGSSGGGSEVQLVESGGGLVQP | | |
| GGSLRLSCAVSGFSLTDYGVNWVRQAPGKGLEWLGVIWGDGTTDYADS | | |
| LKGRFTISKDNSKNTVYLQMNSLRAEDTAVYYCVTGLFDYWGQGTLLT | | |
| VSS | | |
| EVQLVESGGGLVQPGGSLRLSCAASGFSLTDYGVNWVRQAPGKGLEWV | 388. | >Omega10(HL) |
| SVIWGDGTTDYADSVKGRFTISRDNSKNTLYLQMNSLRAEDTAVYYCA | | |
| RGLFDYWGQGTLVTVSSGGGGSGGGGSGGGGSSGGGSDIQMTQSPSSL | | |
| SASVGDRVTITCRSSTGAVTTSNYASWYQQKPGKAPKLLIYGTNNRAP | | |
| GVPSRFSGSGSGTDFTLTISSLQPEDFATYYCALWYSNHWVFGQGTKV | | |
| EIK | | |

TABLE 17
Second & Third generation sCAR constructs

| | Seq id | |
|---|---|---|
| Sequence | no | Name |
| DAVVTQESALTSSPGETVTLTCRSSTGAVTTSNYASWVQEKPDHLFTG | 389. | >TSY-2-193 |
| LIGGTNNRAPGVPARFSGSLIGDKAALTITGAQTEDEAIYFCVLWYSD | | |
| HWVFGGGTKLTVLGGGGGSGGGGSGGGGSGGGGSDVQLQESGPGLVAP | | |
| SQSLSITCTVSGFLLTDYGVNWVRQSPGKGLEWLGVIWGDGITDYNSA | | |
| LKSRLSVTKDNSKSQVFLKMNSLQSGDSARYYCVTGLFDYWGQGTTLT | | |
| VSSESKYGPPCPPCPDIYIWAPLAGTCGVLLLSLVITLYCKRGRKKLL | | |
| YIFKQPFMRPVQTTQEEDGCSCRFPEEEEGGCELRVKFSRSADAPAYK | | |
| QGQNQLYNELNLGRREEYDVLDKRRGRDPEMGGKPRRKNPQEGLYNEL | | |
| QKDKMAEAYSEIGMKGERRRGKGHDGLYQGLSTATKDTYDALHMQALP | | |
| PR | | |
| DAVVTQESALTSSPGETVTLTCRSSTGAVTTSNYASWVQEKPDHLFTG | 390. | >MM-02-107 |
| LIGGTNNRAPGVPARFSGSLIGDKAALTITGAQTEDEAIYFCVLWYSD | | |
| HWVFGGGTKLTVLGGGGGSGGGGSGGGGSGGGGSDVQLQESGPGLVAP | | |
| SQSLSITCTVSGFLLTDYGVNWVRQSPGKGLEWLGVIWGDGITDYNSA | | |
| LKSRLSVTKDNSKSQVFLKMNSLQSGDSARYYCVTGLFDYWGQGTTLT | | |
| VSSESKYGPPCPPCPDFWVLVVVGGVLACYSLLVTVAFIIFWVKRGRK | | |
| KLLYIFKQPFMRPVQTTQEEDGCSCRFPEEEEGGCELRVKFSRSADAP | | |
| AYKQGQNQLYNELNLGRREEYDVLDKRRGRDPEMGGKPRRKNPQEGLY | | |
| NELQKDKMAEAYSEIGMKGERRRGKGHDGLYQGLSTATKDTYDALHMQ | | |
| ALPPR | | |
| DAVVTQESALTSSPGETVTLTCRSSTGAVTTSNYASWVQEKPDHLFTG | 391. | >MM-02-083 |
| LIGGTNNRAPGVPARFSGSLIGDKAALTITGAQTEDEAIYFCVLWYSD | | |
| HWVFGGGTKLTVLGGGGGSGGGGSGGGGSGGGGSDVQLQESGPGLVAP | | |
| SQSLSITCTVSGFLLTDYGVNWVRQSPGKGLEWLGVIWGDGITDYNSA | | |
| LKSRLSVTKDNSKSQVFLKMNSLQSGDSARYYCVTGLFDYWGQGTTLT | | |
| VSSESKYGPPCPPCPDFWVLVVVGGVLACYSLLVTVAFIIFWVRSKRS | | |
| RLLHSDYMNMTPRRPGPTRKHYQPYAPPRDFAAYRSRVKFSRSADAPA | | |
| YKQGQNQLYNELNLGRREEYDVLDKRRGRDPEMGGKPRRKNPQEGLYN | | |
| ELQKDKMAEAYSEIGMKGERRRGKGHDGLYQGLSTATKDTYDALHMQA | | |
| LPPR | | |
| DAVVTQESALTSSPGETVTLTCRSSTGAVTTSNYASWVQEKPDHLFTG | 392. | >MM-02-085 |
| LIGGTNNRAPGVPARFSGSLIGDKAALTITGAQTEDEAIYFCVLWYSD | | |
| HWVFGGGTKLTVLGGGGGSGGGGSGGGGSGGGGSDVQLQESGPGLVAP | | |
| SQSLSITCTVSGFLLTDYGVNWVRQSPGKGLEWLGVIWGDGITDYNSA | | |
| LKSRLSVTKDNSKSQVFLKMNSLQSGDSARYYCVTGLFDYWGQGTTLT | | |
| VSSIEVMYPPPYLDNEKSNGTIIHVKGKHLCPSPLFPGPSKPFWVLVV | | |
| VGGVLACYSLLVTVAFIIFWVRSKRSRLLHSDYMNMTPRRPGPTRKHY | | |
| QPYAPPRDFAAYRSRVKFSRSADAPAYKQGQNQLYNELNLGRREEYDV | | |
| LDKRRGRDPEMGGKPRRKNPQEGLYNELQKDKMAEAYSEIGMKGERRR | | |
| GKGHDGLYQGLSTATKDTYDALHMQALPPR | | |
| DAVVTQESALTSSPGETVTLTCRSSTGAVTTSNYASWVQEKPDHLFTG | 393. | >MM-02-084 |
| LIGGTNNRAPGVPARFSGSLIGDKAALTITGAQTEDEAIYFCVLWYSD | | |
| HWVFGGGTKLTVLGGGGGSGGGGSGGGGSGGGGSDVQLQESGPGLVAP | | |
| SQSLSITCTVSGFLLTDYGVNWVRQSPGKGLEWLGVIWGDGITDYNSA | | |
| LKSRLSVTKDNSKSQVFLKMNSLQSGDSARYYCVTGLFDYWGQGTTLT | | |
| VSSESKYGPPCPPCPDFWVLVVVGGVLACYSLLVTVAFIIFWVRSKRS | | |
| RLLHSDYMNMTPRRPGPTRKHYQPYAPPRDFAAYRSKRGRKKLLYIFK | | |
| QPFMRPVQTTQEEDGCSCRFPEEEEGGCELRVKFSRSADAPAYKQGQN | | |
| QLYNELNLGRREEYDVLDKRRGRDPEMGGKPRRKNPQEGLYNELQKDK | | |
| [sequence omitted] | | |
| DAVVTQESALTSSPGETVTLTCRSSTGAVTTSNYASWVQEKPDHLFTG | 394. | >MM-02-086 |
| LIGGTNNRAPGVPARFSGSLIGDKAALTITGAQTEDEAIYFCVLWYSD | | |
| HWVFGGGTKLTVLGGGGGSGGGGSGGGGSGGGGSDVQLQESGPGLVAP | | |
| SQSLSITCTVSGFLLTDYGVNWVRQSPGKGLEWLGVIWGDGITDYNSA | | |
| LKSRLSVTKDNSKSQVFLKMNSLQSGDSARYYCVTGLFDYWGQGTTLT | | |
| VSSIEVMYPPPYLDNEKSNGTIIHVKGKHLCPSPLFPGPSKPFWVLVV | | |
| VGGVLACYSLLVTVAFIIFWVRSKRSRLLHSDYMNMTPRRPGPTRKHY | | |
| QPYAPPRDFAAYRSKRGRKKLLYIFKQPFMRPVQTTQEEDGCSCRFPE | | |
| EEEGGCELRVKFSRSADAPAYKQGQNQLYNELNLGRREEYDVLDKRRG | | |
| RDPEMGGKPRRKNPQEGLYNELQKDKMAEAYSEIGMKGERRRGKGHDG | | |
| LYQGLSTATKDTYDALHMQALPPR | | |
| DIQMTQTTSSLSASLGDRVTISCRASQDISKYLNWYQQKPDGTVKLLI | 395. | >MM-02-109 |
| YHTSRLHSGVPSRFSGSGSGTDYSLTISNLEQEDIATYFCQQGNTLPY | | |
| TFGGGTKLEITGGGGSGGGGSGGGGSEVKLQESGPGLVAPSQSLSVTC | | |
| TVSGVSLPDYGVSWIRQPPRKGLEWLGVIWGSETTYYNSALKSRLTII | | |
| KDNSKSQVFLKMNSLQTDDTAIYYCAKHYYYGGSYAMDYWGQGTSVTV | | |
| SSTTTPAPRPPTPAPTIASQPLSLRPEACRPAAGGAVHTRGLDFACDF | | |
| WVLVVVGGVLACYSLLVTVAFIIFWVRSKRSRLLHSDYMNMTPRRPGP | | |
| TRKHYQPYAPPRDFAAYRSRVKFSRSADAPAYKQGQNQLYNELNLGRR | | |
| EEYDVLDKRRGRDPEMGGKPRRKNPQEGLYNELQKDKMAEAYSEIGMK | | |
| GERRRGKGHDGLYQGLSTATKDTYDALHMQALPPR | | |
| DIQMTQTTSSLSASLGDRVTISCRASQDISKYLNWYQQKPDGTVKLLI | 396. | >MM-02-110 |
| YHTSRLHSGVPSRFSGSGSGTDYSLTISNLEQEDIATYFCQQGNTLPY | | |
| TFGGGTKLEITGGGGSGGGGSGGGGSEVKLQESGPGLVAPSQSLSVTC | | |
| TVSGVSLPDYGVSWIRQPPRKGLEWLGVIWGSETTYYNSALKSRLTII | | |
| KDNSKSQVFLKMNSLQTDDTAIYYCAKHYYYGGSYAMDYWGQGTSVTV | | |
| SSTTTPAPRPPTPAPTIASQPLSLRPEACRPAAGGAVHTRGLDFACDF | | |
| WVLVVVGGVLACYSLLVTVAFIIFWVRSKRSRLLHSDYMNMTPRRPGP | | |
| TRKHYQPYAPPRDFAAYRSKRGRKKLLYIFKQPFMRPVQTTQEEDGCS | | |
| CRFPEEEEGGCELRVKFSRSADAPAYKQGQNQLYNELNLGRREEYDVL | | |
| DKRRGRDPEMGGKPRRKNPQEGLYNELQKDKMAEAYSEIGMKGERRRG | | |
| KGHDGLYQGLSTATKDTYDALHMQALPPR | | |
| DIQMTQTTSSLSASLGDRVTISCRASQDISKYLNWYQQKPDGTVKLLI | 397. | >CART19 |
| YHTSRLHSGVPSRFSGSGSGTDYSLTISNLEQEDIATYFCQQGNTLPY | | |
| TFGGGTKLEITGGGGSGGGGSGGGGSEVKLQESGPGLVAPSQSLSVTC | | |
| TVSGVSLPDYGVSWIRQPPRKGLEWLGVIWGSETTYYNSALKSRLTII | | |
| KDNSKSQVFLKMNSLQTDDTAIYYCAKHYYYGGSYAMDYWGQGTSVTV | | |
| SSTTTPAPRPPTPAPTIASQPLSLRPEACRPAAGGAVHTRGLDFACDI | | |
| YIWAPLAGTCGVLLLSLVITLYCKRGRKKLLYIFKQPFMRPVQTTQEE | | |
| DGCSCRFPEEEEGGCELRVKFSRSADAPAYKQGQNQLYNELNLGRREE | | |
| YDVLDKRRGRDPEMGGKPRRKNPQEGLYNELQKDKMAEAYSEIGMKGE | | |
| RRRGKGHDGLYQGLSTATKDTYDALHMQALPPR | | |

[0382] The CAR-antibody may have a binding affinity for the CAR-ID of less than about 0.01 pM, about 0.02 pM, about 0.03 pM, about 0.04 pM, 0.05 pM, about 0.06 pM, about 0.07 pM, about 0.08 pM, about 0.09 pM, about 0.1 pM, about 0.2 pM, 0.3 pM, about 0.4 pM, about 0.5 pM, about 0.6 pM, about 0.7 pM, about 0.8 pM, about 0.9 pM or about 1 pM, about 2 pM, about 3 pM, about 4 pM, about 5 pM, about 6 pM, about 7 pM, about 8 pM, about 9 pM, about 10 pM, about 0.01 nM, about 0.02 nM, about 0.03 nM, about 0.04 nM, about 0.05 nM, about 0.06 nM, about 0.07 nM, about 0.08 nM, about 0.09 nM, about 0.1 nM, about 0.2 nM, about 0.3 nM, about 0.4 nM, about 0.5 nM, about 0.6 nM, about 0.7 nM, about 0.8 nM, about 0.9 nM, about 1 nM, about 2 nM, about 2.5 nM, about 3 nM, about 4 nM, about 5 nM, about 6 nM, about 7 nM, about 8 nM, about 9 nM, about 10 nM, about 12 nM, about 14 nM, about 16 nM, about 18 nM, about 20 nM, about 22 nM, about 24 nM, about 26 nM, about 28 nM or about 30 nM.

[0383] The extracellular domain may comprise an anti-fluorescein isothiocyanate (FITC) antibody or a FITC-binding portion thereof. The anti-FITC antibody may be an anti-FITC scFv. The anti-FITC scFv may be selected from 4-4-20, 4D5Flu, 4M5.3 and FITC-E2. The anti-FITC scFv may be encoded by a sequence selected from SEQ ID NOs: 87-90.

[0384] The CAR-antibody may recognize a synthetic (non-naturally-occurring) peptide. The CAR-antibody may comprise an antibody or antibody fragment that recognizes a FLAG® tag or a fragment thereof. The CAR-antibody may comprise an antibody or antibody fragment that recognizes a yeast transcription factor GCN4 or a fragment thereof. The CAR-antibody may comprise an anti-HTP antibody or a fragment thereof.

[0385] The transmembrane domain and/or the intracellular domain may comprise at least a portion of a cytoplasmic signaling domain. The transmembrane domain may comprise a CD8 transmembrane sequence. The transmembrane domain may comprise a CD28 transmembrane sequence. The transmembrane domain may comprise a sequence that is at least 85%, 90%, 95%, 96%, 97%, 98%, or at least 99% identical to SEQ ID NO: 398 or SEQ ID NO: 417. The intracellular domain may comprise at least a portion of a signaling molecule selected from the group comprising CD3, CD28, and 4-1BB. The intracellular domain may comprise (i) the CD3 sequence SEQ ID NO: 420, (ii) the CD28 sequence SEQ ID NO: 418, (iii) the 4-1BB sequence SEQ ID NO: 419, or a combination of (i) and (ii), (i) and (iii), (ii) and (iii), or all of (i)-(iii). The intracellular domain may comprise a sequence that is at least 85%, 90%, 95%, 96%, 97%, 98%, or at least 99% identical to the CD3 sequence SEQ ID NO: 420. The intracellular domain may comprise a sequence that is at least 85%, 90%, 95%, 96%, 97%, 98%, or at least 99% identical to the CD28 sequence SEQ ID NO: 418. The intracellular domain may comprise a sequence that is at least 85%, 90%, 95%, 96%, 97%, 98%, or at least 99% identical to the 4-1BB sequence SEQ ID NO: 419. The intracellular domain may comprise an Fc receptor or a portion thereof. The Fc receptor or portion thereof may be CD16 or a portion thereof. The signaling molecule may comprise CD3 ζ. The signaling molecule may comprise CD28. The signaling molecule may comprise 4-1BB. The intracellular domain may comprise at least a portion of CD3 ζ. The intracellular domain may comprise at least a portion of CD28, the intracellular domain may comprise at least a portion of 4-1BB, the intracellular domain may comprise at least a portion of OX-40, the intracellular domain may comprise at least a portion of CD30, the intracellular domain may comprise at least a portion of CD40, the intracellular domain may comprise at least a portion of CD2. The intracellular domain may comprise at least a portion of CD27. The intracellular domain may comprise at least a portion of PD-1. The intracellular domain may comprise at least a portion of ICOS. The intracellular domain may comprise at least a portion of lymphocyte function-associated antigen-1 (LFA-1). The intracellular domain may comprise at least a portion of CD7. The intracellular domain may comprise at least a portion of identical to lymphotoxins, inducible expression, competes with herpesvirus glycoprotein D for herpes virus entry mediator, a receptor expressed on T lymphocytes (LIGHT). The intracellular domain may comprise at least a portion of NKG2C. The intracellular domain may comprise at least a portion of B7-H3. The intracellular domain may comprise at least a portion of a cytoplasmic signaling domain from one or more signaling molecules. The intracellular domain may comprise at least a portion of two or more cytoplasmic signaling domains. The two or more cytoplasmic signaling domains may be from two or more different signaling molecules. The intracellular domain may comprise at least a portion of three or more cytoplasmic signaling domains. The intracellular domain may comprise at least a portion of four or more cytoplasmic signaling domains. The intracellular domain may comprise at least a portion of a ligand that binds to one or more signaling molecules. The intracellular domain may comprise at least a portion of a ligand that binds to CD83.

[0386] The CAR may comprise a hinge. The hinge may be located between the transmembrane domain and the extracellular domain. The hinge may comprise a portion of the transmembrane domain. The hinge may comprise a portion of the extracellular domain. The hinge may provide a length, orientation, geometry or flexibility to the CAR that is necessary for an optimal immunological synapse. The optimal immunological synapse may provide for an optimal distance and/or orientation between the CAR-EC and the target cell. The optimal immunological synapse may provide for optimal and/or maximal cytotoxicity against the target cell. As shown in Example 15 of PCT/US2016/027990, incorporated herein by reference in its entirety, CD19 targeting switches with FITC grafted proximal to the antigen binding interface of the FMC63 Fab, may be superior to switches with FITC grafted at the C-terminus. Although the epitope of anti-CD19 antibody FMC63 and corresponding structure of the CD19 antigen are not known, this may be due to a decreased distance between target cell and sCAR-T cell. In the physiological immunological synapse formed by the native T cell receptor (TCR), the distance between the T cell and antigen presenting cell is approximately 150 Å. This distance is critical to sterically exclude inhibitory phosphatases such as CD45 and CD148 from the synapse which act to dephosphorylate signaling molecules and down regulate T cell activation. It is likely that the longer synapse contributed by the C-terminal switches (65 Å longer than the N-terminal switches by length of Fab) is unable to sterically exclude these inhibitory molecules, resulting in less productive sCAR signaling. Thus, the methods disclosed herein may comprise modulating the distance of the immunological synapse by modulating the length of the switch and/or CAR extracellular domain such that the distance of the immunological synapse is not greater than about 100 Å, about 150 Å, about 175 Å, or about 200 Å.

[0387] In some embodiments, the optimal immunological synapse may be, e.g., no greater than about 100 Å, about 150 Å, about 175 Å, or about 200 Å.

[0388] The hinge may be derived from the extracellular domain of an endogenous transmembrane protein specific to T cell such as CD28 or 4-1BB, or components of CD3. The hinge may be derived from a synthetically derived sequence (such as the ones listed for linkers relevant to switch design). The hinge may be derived from a human protein. The hinge may be contiguous with the transmembrane domain. This hinge may comprise part of the heavy chain constant region 1 of the scFv). This hinge may comprise part of the light chain constant region 1 of the scFv).

[0389] The hinge length may be between about 1 amino acid and about 10 amino acids. The hinge length may be between 1 amino acid and about 20 amino acids. The hinge length may be between about 1 amino acid and about 50 amino acids. The hinge length may be between about 1 amino acid and about 100 amino acids. The hinge length may be between 10 amino acids and about 50 amino acids. The hinge length may be about 12 amino acids. The hinge length may be about 45 amino acids.

[0390] The hinge may be a long hinge. The long hinge may have a length of about 20 to about 200 amino acids, about 20 to about 100 amino acids, about 30 to about 100 amino acids, about 40 to about 100 amino acids, or about 45 to about 100 amino acids.

[0391] The hinge may be a short hinge. The short hinge may have a length of about 1 to about 20 amino acids, about 5 to about 20 amino acids, or about 10 to about 20 amino acids.

[0392] The hinge may comprise a portion of a CD8 protein. The portion of the CD8 protein may be between about 4 amino acids and about 100 amino acids. The portion of the CD8 protein may be about 45 amino acids. The hinge may comprise a portion of an immunoglobulin. The immunoglobulin may be an IgG. The immunoglobulin may be an IgG4. The IgG4 may be mutated (referred to herein as IgG4m). The portion of the immunoglobulin may be between about 1 amino acid and about 20 amino acids. The portion of the immunoglobulin may be about 12 amino acids.

[0393] The hinge may be flexible. The hinge may be structured.

[0394] As used herein in reference to a peptide sequence (e.g. a hinge or linker disclosed herein), the term “flexible” means a peptide sequence that comprises a linear sequence of amino acids with little or no known secondary structure. Such flexible sequences may comprise linear sequences of amino acids in which the torsion angles or rotation around the bonds of the polypeptide backbone have freedom to occupy many different orientations. In some embodiments, reference to a “flexible hinge” means that a hinge comprises a flexible peptide sequence that allows a CAR to bind CAR-IDs via various binging orientations, thus, alleviating steric hindrance that would otherwise have been detrimental to the CAR-ID binding the CAR extracellular domain.

[0395] As used herein in reference to a peptide sequence (e.g. a hinge or linker disclosed herein), the term “structured” means a peptide sequence that comprises a linear sequence of amino acids that forms a defined secondary structure. Such structured sequences may comprise a linear sequence of amino acids in which the torsion angles or rotation around the bonds of the polypeptide backbone have defined preferences to occupy a limited number of orientations. In some embodiments, a structured hinge may comprise a peptide sequence that defines the immunological synapse and reduces entropic costs of finding more productive orientation. Said another way, a structured hinge is, in some embodiments, a hinge that is not flexible. In various embodiments, the terms “rigid” and “structured,” are used interchangeably in reference to a peptide sequence (e.g., a hinge or linker disclosed herein).

[0396] The hinge may comprise a sequence selected from SEQ ID NOS: 93-103. The hinge may comprise a sequence that is at least about 50% identical to a sequence selected from SEQ ID NOS: 93-103. The hinge may comprise a sequence selected from SEQ ID NOS: 165-168. The hinge may comprise a sequence that is at least about 50% identical to a sequence selected from 165-168. The hinge may comprise a sequence of SEQ ID NOS: 421. The hinge may comprise a sequence that is at least 50% identical to SEQ ID NOS: 421. The hinge may comprise a sequence that is at least 85%, 90%, 95%, 96%, 97%, 98%, or at least 99% identical to any one sequence selected form SEQ ID NOS: 165-168, and 421. The CAR having a hinge region may be encoded by a sequence selected from SEQ ID NOS: 181-183. The CAR having a hinge region may be encoded by a sequence that is at least about 50% identical to a sequence selected from SEQ ID NOS: 181-183. The hinge may consist of SEQ ID NO: 165. The hinge may comprise or consist of SEQ ID NO: 167. The hinge may comprise or consist of SEQ ID NO: 168. The hinge of SEQ ID NO: 168 may further comprise a c-terminal D residue. The hinge may comprise or consist of SEQ ID NO: 421. The hinge may comprise or consist of a sequence that is at least 50%, at least 60%, at least 70%, at least 80%, at least 85%, at least, at least 90%, at least 95%, at least 96%, at least, 97%, at least 98%, or at least 99% identical to SEQ ID NO: 165, SEQ ID NO: 167, SEQ ID NO: 168, or SEQ ID NO: 421.

[0397] The hinge may comprise a sequence that is identical to any one of SEQ ID NOS: 165, 167, 168, or 421 and the hinge may further comprise a sequence of SEQ ID NO: 166. For example, the IgG4m hinge sequence SEQ ID NO: 168, may further comprise a C-terminal D residue (SEQ ID NO: 166).

[0398] The CAR may be expressed at relatively low levels on the CAR-EC. The CAR may be expressed at relatively high levels on the CAR-EC. The CAR may be expressed at a cell density of less than about 2×10⁶ receptors per cell. The CAR may be expressed at a cell density of about 0.5×10⁶ receptors per cell. The CAR may be expressed at a cell density of more than about 0.05×10⁶ per cell The CAR may be expressed under the control of a promoter selected from EF1a, IL-2, CMV, and synthetic promoters designed to increase or decrease CAR expression. The promoter may be constitutive. The promoter may be inducible.

[0399] In some particular embodiments, the CAR comprises (a) an extracellular domain that comprises or consists of an scFv, (b) a hinge, (c) a transmembrane domain, and (d) an intracellular domain, wherein

[0400] a. the scFv is selected from
[0401] i. an scFv encoded by any one of the amino acid sequences provided in Tables 14-17;
[0402] ii. an scFv encoded by any one of SEQ ID NOS: 290-388, and 423;

[0403] b. the hinge is selected from
[0404] i. an IgG4 hinge, an IgG4m hinge, a CD28 hinge, and a CD8 hinge;
[0405] ii. a hinge comprising any one of SEQ ID NOS: 165, 167, 168, and 421; and
[0406] iii. a hinge consisting of any one of SEQ ID NOS: 165, 167, 168, and 421;

[0407] c. the transmembrane domain is selected from
[0408] i. a CD8 transmembrane domain or a portion thereof or a CD28 transmembrane domain or a portion thereof;
[0409] ii. a transmembrane domain comprising any one of SEQ ID NOS: 398 and 417
[0410] iii. a transmembrane domain consisting of any one of SEQ ID NOS: 398 and 417 and

[0411] d. the intracellular domain is selected from:
[0412] i. an intracellular domain comprising a CD3 signaling molecule;
[0413] ii. an intracellular domain comprising a CD3 signaling molecule and a CD28 signaling molecule;
[0414] iii. an intracellular domain comprising a CD3 signaling molecule and a 4-1BB signaling molecule; and
[0415] iv. an intracellular domain comprising a CD3 signaling molecule, a CD28 signaling molecule, and a 4-1BB signaling molecule.

[0416] In some particular embodiments, the CAR comprises a structure selected from constructs A-H in FIG. 24A. In certain embodiments, the CAR comprises a structure according to construct E in FIG. 24A. In certain embodiments, the CAR is selected from the CARs described in Table 11. In certain particular embodiments, the CAR is selected from the CARs described in Table 12. In certain particular embodiments, the CAR comprises a sequence of any one of SEQ ID NOS: 401, 403, 405, 407, 409, 411, 413, and 415. In certain particular embodiments, the CAR comprises a sequence of any one of SEQ ID NOS: 389-397. In certain particular embodiments, the CAR consists of a sequence selected from SEQ ID NOS: 389-397, 401, 403, 405, 407, 409, 411, 413, and 415. In certain particular embodiments, the CAR comprises or consists of an amino acid sequence that is at least 50%, at least 60%, at least 70%, at least 80%, at least 85%, at least 90%, at least 95%, at least 96%, at least 97%, at least 98%, or at least 99% identical to a sequence. In certain particular embodiments, the CAR is encoded by a sequence selected from SEQ ID NOS: 400, 402, 404, 406, 408, 410, 412, 414, and 416.

### Multivalent CARS

[0417] Valency can also be engineered into a CAR hinge (FIG. 17C). By way of non-limiting example, a monovalent switch may recruit two CARs through a disulfide that forms in the hinge region of the CAR. The hinge may be a CD8-derived hinge (SEQ ID NO. 165) which is expected to be monovalent. The hinge may be derived from the hinge region of an IgG molecule. The IgG molecule may be selected from IgG1, IgG4 or IgG4m (mutated). The IgG4 hinge (SEQ ID NO. 167) may not participate in interchain disulfides but instead has intrachain disulfide bonds which do not dimerize the CAR. The hinge may be considered functionally monovalent. The IgG1 and IgG4m hinge (SEQ ID NO. 168) may contain a serine to proline mutation which enables it to participate in interchain disulfide bonds which covalently dimerizes the hinge region (FIG. 17). These hinges may be used to study both the distance constraints of an immunological synapse (by testing the long CD8-derived hinge vs the short IgG4 derived hinge) and the valency effect (by testing the short IgG4 derived hinge vs an IgG4m derived CAR) of the CAR and/or switch. Other hinges may comprise CH2 and/or CH3 of IgG1, IgG2, IgG3, or IgG4 molecules, or portions thereof, or combinations thereof. The hinge may be derived from CD28. The hinge may dimerize.

coCARS/iCARs

[0418] The switchable CARs and switches disclosed herein may encompass inhibitory chimeric antigen receptor (iCAR)-T cell switches and switchable iCAR-T cells for targeting an immune response to specific cells (e.g., diseased cells) and minimizing an immune attack on healthy cells. The switchable CARs and switches disclosed herein may also encompass co-stimulatory chimeric antigen receptor (coCAR)-T cell switches for use with switchable coCAR-T cells for targeting an immune response to target cells (e.g., diseased cells) and maximizing an immune attack on these cells. iCAR-T cell switches and coCAR-T cell switches comprise a CAR-binding domain and a target binding domain. Compositions disclosed herein may comprise a plurality of switches for modulating a chimeric antigen receptor-effector cell (CAR-EC), wherein a first switch that interacts with a first antigen on a first target cell and a first chimeric antigen receptor (CAR) on the CAR-EC; and a second switch that interacts with a second antigen on a second target cell and a second chimeric antigen receptor (CAR) on the CAR-EC. The plurality of switches may be used with existing CAR-T cells and with CAR-ECs that express a canonical CAR and/or an inhibitory CAR (iCAR). The plurality of switches may be used with existing CAR-T cells and with CAR-ECs that express a canonical CAR and/or a co-stimulatory CAR (coCAR).

[0419] The switchable CAR-EC cells disclosed herein may comprise a first switchable CAR and a second switchable CAR. The first switchable CAR may be a canonical CAR and the second switchable CAR may be an iCAR. The first switchable CAR may be a canonical CAR and the second switchable CAR may be a co-CAR.

[0420] The iCAR may comprise a chimeric receptor which provides an inhibitory signal to CAR-T cells. The iCAR may comprise a cytoplasmic domain selected from PD-1 or CTLA-4. The iCAR may be expressed by the same cell as a canonical (activating) CAR. Activation of the iCAR may tune down a canonical CAR signal and/or activity. The specificity of the iCAR can be used to protect tissues in which CAR-T cell activity is not desirable. iCAR activity may be controlled by a switch, referred to as an “iCAR switch” herein. Similarly, canonical CAR activity may be controlled by the first and/or second switch, referred to as an “aCAR switch” herein. A switchable iCAR-T cell enables targeting of antigens that may be unsafe to target with a canonical or CAR-T cell.

[0421] To mount an immune response, the aCAR switch binds a positive, or “A” antigen on a target cell that is to be attacked (e.g. cancer cell) and the canonical CAR, stimulating cytotoxic activity towards the target cell through activation of the canonical CAR. To protect normal tissue, the iCAR switch binds a negative, or “B”, antigen on a cell that is to be avoided by T cells (e.g., a healthy cell) and the iCAR, inhibiting immune activity through signaling of the iCAR. The “B” antigen may be ubiquitously expressed on normal tissue but down-regulated in most malignant cells. The “A” antigen may be over-expressed in malignant cells relative to normal tissue. The B antigen may be opioid binding protein/cell adhesion molecule-like gene (OPCML). The B antigen may be selected from hyaluronidase 2 (HYAL2), deleted in colorectal cancer (DCC), and SMAR1.

[0422] The coCAR may comprise a chimeric receptor which provides a co-stimulatory signal to CAR-T cells. The coCAR may comprise a cytoplasmic domain selected from CD137 and/or CD28. The coCAR may be expressed by the same cell as a canonical (activating) CAR. Activation of the coCAR may enhance and/or synergize a canonical CAR signal and/or activity. The coCAR may increase cytotoxicity towards a target cell relative to the cytotoxicity towards a target cell generated by a CAR-T cell that only expresses a canonical CAR-T cell. coCAR activity may be controlled by a switch, referred to as an “coCAR switch” herein. Similarly, canonical CAR activity may be controlled by the first and/or second switch, referred to as an “aCAR switch” herein.

### Non-Antibody CARs

[0423] In some embodiments, in contrast to conventional CARs, the chimeric antigen receptors disclosed herein may comprise a non-antibody extracellular domain that interacts with the CAR-ID. That is, the extracellular domain may comprise a non-antibody protein or a non-antibody peptide that interacts with the CAR-ID. Thus, the chimeric antigen receptor may not actually recognize an antigen on a target in the traditional sense of an antibody or antibody fragment recognizing an antigen, but interact with the target in ways that a non-antibody protein or peptide would. In these cases, the chimeric antigen receptor may be referred to more accurately as a “chimeric receptor.” A person of skill in the art would understand that in many examples and descriptions throughout this disclosure, the chimeric antigen receptor may be a chimeric receptor. The chimeric receptor binding partner of the switch may be non-antibody protein or peptide. Thus, the chimeric receptor and the switch may have a protein-protein interaction or a protein-peptide interaction.

### Protein-Protein Interactions

[0424] The CAR may comprise a non-antibody extracellular domain, wherein the extracellular domain comprises a non-antibody protein. The non-antibody protein may interact with the chimeric receptor binding partner, wherein the chimeric receptor binding partner comprises a chimeric receptor binding protein, constituting a protein-protein interaction. The protein-protein interaction may be loose. A loose interaction may be an interaction wherein the chimeric receptor binding partner and the non-antibody peptide bind with a KD of about 10-4 M, about 10-3 M, about 10-2 M, about 10-1 M, or with a KD that is larger than about 10-1 M. The protein-protein interaction may be a tight interaction. A tight interaction may be an interaction wherein the chimeric receptor binding partner and the non-antibody peptide bind with a KD of about 10-5 M, about 10-6 M, about 10-7 M, about 10-8 M, about 10-9 M, about 10-10 M, about 10-11 M or about 10-12 M. The protein-protein interaction may comprise a covalent protein-protein interaction. The protein-protein interaction may comprise a non-covalent protein-protein interaction. The non-antibody protein and/or chimeric receptor binding protein may comprise an enzyme. The enzyme may be a nuclease. The nuclease may be a ribonuclease. The ribonuclease may be prokaryotic. The non-antibody protein and/or chimeric receptor binding protein may comprise a substrate. The non-antibody protein may comprise barnase and the chimeric receptor binding protein may comprise barstar. The non-antibody protein may comprise barstar and the chimeric receptor binding protein may comprise barnase. Barnase is an amino acid ribonuclease from Bacillus amyloliquefaciens. Barstar is a natural intracellular inhibitor of barnase. Barnase interacts with barstar with high affinity, having a protein-protein binding on-rate of 10\hat{ }8/s/M (Buckle A M, Schreiber G, Fersht A R; Biochemistry 33 (30): 8878-8 (August 1994), incorporated herein by reference in its entirety). Barnase, barstar, and their interactions are described in Mossakowska D E, Nyberg K, Fersht A R; Biochemistry 28 (9): 3843-50 (May 1989), which is incorporated herein by reference in its entirety.

### Protein Peptide Interactions

[0425] The non-antibody protein may interact with the chimeric receptor binding partner, wherein the chimeric receptor binding partner comprises a CAR-ID, constituting a protein-peptide interaction. Alternatively, the non-antibody extracellular domain may comprise a non-antibody peptide that interacts with the chimeric receptor binding partner, wherein the chimeric receptor binding partner comprises a chimeric receptor binding protein, constituting the protein-peptide interaction. The protein-peptide interaction may be a loose interaction. A loose interaction may be an interaction wherein the chimeric receptor binding partner and the non-antibody peptide bind with a KD of about 10-4 M, about 10-3 M, about 10-2 M, about 10-1 M, or with a KD that is larger than about 10-1 M. The protein-peptide interaction may be a tight interaction. A tight interaction may be an interaction wherein the chimeric receptor binding protein and the non-antibody peptide (or the CAR-ID and the non-antibody protein) bind with KD of about 10-5 M, about 10-6 M, about 10-7 M, about 10-8 M, about 10-9 M, about 10-10 M, about 10-11 M or about 10-12 M. The non-antibody protein and/or chimeric receptor binding protein may be selected from a fibrous protein, an adhesion molecule protein and a membrane protein.

[0426] The protein-peptide interaction may comprise a covalent protein-peptide interaction. For example, the non-antibody protein may comprise a Streptococcus pyogenes pilin protein and the CAR-ID may comprise an isopeptag. Alternatively, the non-antibody peptide may comprise an isopeptag and the chimeric receptor binding protein may comprise a Streptococcus pyogenes pilin protein. The interactions between isopeptag and Streptococcus pyogenes pilin protein are described in Kang, H. J., Coulibaly, F., Clow, F., Proft, T., and Baker, E. N. Science 318, 1625-1628 (2007) and Zakeri, B. and Howarth, M.; J. Am. Chem. Soc. 132, 4526-4527 (2010), each of which is incorporated herein by reference in its entirety. The isopeptag sequence is SEQ ID NO: 41. Also, by way of non-limiting example, the non-antibody protein may comprise a Streptococcus pyogenes fibronectin binding protein (SpyCatcher), and the CAR-ID may comprise a SpyTag. Alternatively, the non-antibody peptide may comprise a SpyTag and the chimeric receptor binding protein may comprise a Streptococcus pyogenes fibronectin binding protein (SpyCatcher). The covalent interaction between SpyCatcher and SpyTag are described in Zakeri B, Howarth M, JACS, vol. 109 no. 12, (2012), which is incorporated herein by reference in its entirety.

[0427] The protein-peptide interaction may comprise a non-covalent protein-peptide interaction. For example, non-antibody protein may be selected from a synaptobrevin, a SNAP25 and a syntaxin, and portions thereof (e.g., alpha helix), and the CAR-ID may comprise a SNARE. Alternatively, the non-antibody peptide may comprise a SNARE and the chimeric receptor binding protein may be selected from a synaptobrevin, a SNAP25 and a syntaxin, and portions thereof (e.g., alpha helix). The interactions between SNARE and synaptobrevin, SNAP25 and a syntaxin are described in Sollner T, et al., Nature 362:318-324 (1993); Sutton R B, Fasshauer D, Jahn R, Brunger A T, Nature 395:347-353 (1998); and Darios, F, Proc. Natl. Acad. Sci. U. S. A 107, 18197-18201 (2010), each of which is incorporated herein by reference in its entirety. Also, by way of non-limiting example, the non-antibody protein may comprise an RNAseI and the CAR-ID may comprise a Hu-tag. Alternatively, the non-antibody peptide may comprise a Hu-tag and the chimeric receptor binding protein may comprise an RNAseI. Also, by way of non-limiting example, the non-antibody protein may comprise a HuS adapter protein and the CAR-ID may comprise a Hu-tag. Alternatively, the non-antibody peptide may comprise a Hu-tag and the chimeric receptor binding protein may comprise a HuS adapter protein. Interactions between Hu-tag and RNase I and Hu-tag and HuS adapter protein are described in Backer, M. V., et. al., Adapter protein for site-specific conjugation of payloads for targeted drug delivery. Bioconjugate Chem. 15, 1021-1029 (2004), which is incorporated herein by reference in its entirety.

### Peptide-Peptide Interactions

[0428] The CAR may comprise a non-antibody extracellular domain, wherein the extracellular domain comprises a non-antibody peptide. The non-antibody peptide may interact with the chimeric receptor binding partner, wherein the chimeric receptor binding partner comprises a CAR-ID, constituting a peptide-peptide interaction. The peptide-peptide interaction may be a loose interaction. A loose interaction may be an interaction wherein the chimeric receptor binding partner and the non-antibody peptide bind with a KD of about 10-4 M, about 10-3 M, about 10-2 M, about 10-1 M, or with a KD that is larger than about 10-1 M. The peptide-peptide interaction may be a tight interaction. A tight interaction may be an interaction wherein the CAR-ID and the non-antibody peptide (or the CAR-ID and the non-antibody peptide) bind with a KD of about 10-5 M, about 10-6 M, about 10-7 M, about 10-8 M, about 10-9 M, about 10-10 M, about 10-11 M or about 10-12 M. The non-antibody peptide and/or CAR-ID may comprise be selected from a secondary structure of a protein (e.g., alpha helix, beta sheet), a protein domain, an enzyme domain, a dimerization domain, and a multimerization domain.

[0429] The peptide-peptide interaction may comprise a non-covalent peptide-peptide interaction. The non-antibody peptide may comprise a first alpha helix of a protein, and the CAR-ID may comprise a second alpha helix of a protein. The first alpha helix and the second alpha helix may form a coiled coil structure. For example, but not to be limited in any way, the first peptide may be selected from any one of the E/K peptides disclosed in Litowski, J. R. (2002) (e.g., any one of SEQ ID NOS: 46-44, and 45-46, 47-58), and the second peptide may be selected from any peptide that is capable of forming an alpha helix with the first peptide. The second peptide may be an E/K peptide disclosed in Litowski (2002) (e.g., any one of SEQ ID NOS: 43-44, 45-46, 47-58) The non-antibody protein may comprise the K4 peptide (SEQ ID NO: 43) and the chimeric receptor binding protein may comprise the E4 peptide (SEQ ID NO: 44). The non-antibody protein may comprise the E4 peptide (SEQ ID NO: 44) and the chimeric receptor binding protein may comprise the K4 peptide (SEQ ID NO: 43). The interactions between the K4 and E4 peptides are described in Litowski, J. R., and R. S. Hodges. J Biol Chem, 277: 37272-9 (2002) and Woolfson, D. N., Adv Protein Chem, 70: 79-112 (2005), each of which is incorporated herein by reference in its entirety. The non-antibody protein may comprise a modified K4 peptide and the chimeric receptor binding protein may comprise a modified E4 peptide. The non-antibody protein may comprise a modified E4 peptide and the chimeric receptor binding protein may comprise a modified K4 peptide. The non-antibody protein may comprise a modified K4 peptide and the chimeric receptor binding protein may comprise the E4 peptide (SEQ ID NO: 44). The non-antibody protein may comprise a modified E4 peptide and the chimeric receptor binding protein may comprise a K4 peptide (SEQ ID NO: 43). The non-antibody protein may comprise the K4 peptide (SEQ ID NO: 33) and the chimeric receptor binding protein may comprise a modified E4 peptide. The non-antibody protein may comprise the E4 peptide (SEQ ID NO: 44) and the chimeric receptor binding protein may comprise a modified K4 peptide. The non-antibody protein may consist or consist essentially of a peptide having the sequence of SEQ ID NO: 43 and the chimeric receptor binding protein may consist or consist essentially of a peptide having the sequence of SEQ ID NO: 44. The non-antibody protein may consist or consist essentially of a peptide having the sequence of SEQ ID NO: 44 and the chimeric receptor binding protein may consist or consist essentially of a peptide having the sequence of SEQ ID NO: 43. The non-antibody protein may comprise a peptide having a sequence that has at least 85%, at least 90%, at least 95% or greater identity to SEQ ID NO: 43 and the chimeric receptor binding protein may comprise a peptide having a sequence that has at least 85%, at least 90%, at least 95% or greater identity to SEQ ID NO: 44. The non-antibody protein may comprise a peptide having a sequence that has at least 85%, at least 90%, at least 95% or greater identity to SEQ ID NO: 44 and the chimeric receptor binding protein may comprise a peptide having a sequence that has at least 85%, at least 90%, at least 95% or greater identity to SEQ ID NO: 43.

[0430] Also, by way of non-limiting example, the non-antibody peptide may comprise a first alpha helix of a mouse coronin 1 Å protein, and the CAR-ID may comprise a second alpha helix of a mouse coronin 1 Å protein. The coiled-coil interactions of mouse coronin 1 Å proteins are described in Kammerer R A, et al., Proc Natl Acad Sci USA 102:13891-13896 (2005), which is incorporated herein by reference in its entirety.

[0431] Also, by way of non-limiting example, the non-antibody peptide may comprise an anchoring domain (AD) of an A-kinase anchoring protein (AKAP) and the CAR-ID may comprise a dimerization and docking domain (DDD) of cAMP-dependent protein kinase A. The interaction of ADs with DDDs, known as the Dock and Lock system, have been describe in Rossi E A, Goldenberg D M, Chang C H, Bioconjug Chem. March 21; 23(3):309-23 (2012); Rossi E A, et. al., Proc Natl Acad Sci USA. May 2; 103(18):6841-6 (2006); and Backer M V, Patel V, Jehning B T, Backer J M., Bioconjug Chem. July-August; 17(4):912-9 (2006), each of which is incorporated herein by reference in its entirety.

[0432] Thus, by way of non-limiting example, the non-antibody peptide may comprise an anchoring domain (AD1) of an A-kinase anchoring protein and the CAR-ID may comprise a dimerization and docking domain (DDD1) of cAMP-dependent protein kinase A. Alternatively, the non-antibody peptide may comprise the DDD1 and the CAR-ID may comprise the anchoring domain (AD1).

[0433] The peptide-peptide interaction may comprise a covalent peptide-peptide interaction. By way of non-limiting example, the non-antibody peptide may comprise an anchoring domain (AD2) of an A-kinase anchoring protein and the CAR-ID may comprise a dimerization and docking domain (DDD2) of cAMP-dependent protein kinase A, wherein the AD2 and DDD2 have been modified with cysteines that form disulfide bonds between the AD and the DDD. Alternatively, the non-antibody peptide may comprise the DDD2 and the CAR-ID may comprise the AD2, wherein the AD2 and DDD2 have been modified with cysteines that form disulfide bonds between the AD2 and the DDD2. These disulfide bonds may form a covalent interaction between AD2 and the DDD2. This may be advantageous to increase affinity of the non-antibody peptide for the CAR-ID, or vice versa.

[0434] The effector cell may comprise a plurality of chimeric receptors. Two or more of the plurality of chimeric receptors may be the same. Two or more of the plurality of chimeric receptors may be different. Two or more of the plurality of chimeric receptors may each comprise an extracellular domain that comprises a DDD (e.g., DDD1 or DDD2). The DDDs of the two or more of the plurality of chimeric receptors may self-homo-multimerize, to produce multimerized DDDs. The DDDs may self-homo-dimerize, to produce dimerized DDDs. The multimerized or dimerized DDDs may bind to one or more ADs. The multimerized or dimerized DDDs bound to one or more ADs may increase signal transduction and/or activation of the effector cell, relative to a chimeric receptor that comprises one or no DDDs.

[0435] The chimeric receptor may comprise an extracellular domain, wherein the extracellular domain comprises the AD. The switch may comprise the DDD. The switch may be bivalent for the AD because the DDD self-homo-dimerizes upon binding the AD (e.g., see FIG. 17). The DDD self-homo-dimerizing upon binding the AD may increase the avidity of the switch for the target cell and may improve the sensitivity of the switch for the target. This may be relevant for target cells with low surface density (or expression) of the cell surface molecule.

[0436] The switch may comprise the AD and the chimeric receptor may comprise the DDD (e.g., see FIG. 18) or the switch may comprise the DDD and the chimeric receptor may comprise the AD, resulting in a DDD/AD pair (e.g., see FIG. 17). The DDD/AD pair may be smaller than an scFcv/peptide pair resulting from a chimeric antigen receptor comprising an scFv and a switch comprising a peptide, providing a size and geometry to the pair that is optimal for chimeric receptor binding to the chimeric receptor binding partner and subsequent chimeric receptor activation/signaling.

[0437] The chimeric effector receptor cell may be activated by multimerization of crosslinking multiple switches to multiple antigens on the target cell. The minimum number of switches to cause activation may be greater than two. The multimerized or dimerized DDDs may have generally potentiated signaling because it requires fewer crosslinks with switches than a canonical chimeric antigen receptor (e.g., without a dimerized/multimerized extracellular domain or portion thereof) to achieve activation.

### Epsilon CAR

[0438] Further disclosed herein are chimeric antigen receptors comprising: an extracellular domain that interacts with an anti-CD3 antibody or fragment thereof on the switch; a transmembrane domain; and an intracellular domain, wherein at least a portion of the transmembrane domain or at least a portion of the intracellular domain is not based on or derived from a CD3 protein. The extracellular domain may comprise a CD3 extracellular domain or portion thereof. The extracellular domain may comprise a CD3 epsilon extracellular domain or portion thereof. The extracellular domain may comprise a CD3 delta extracellular domain or portion thereof. The extracellular domain may comprise a CD3 gamma extracellular domain or portion thereof. The extracellular domain may comprise a CD3 zeta extracellular domain or portion thereof. The extracellular domain may comprise an alpha chain of TCR extracellular domain or portion thereof. The extracellular domain may comprise a pre-alpha chain of TCR extracellular domain or portion thereof. The extracellular domain may comprise a beta chain of TCR extracellular domain or portion thereof.

### VII Kits, Vectors and Polynucleotides

[0439] Disclosed herein are kits comprising one or more CAR-EC switch disclosed herein. In some embodiments, the disclosure provides a kit comprising an anti-CD19 switch disclosed herein comprising a CAR-ID. In some embodiments, the disclosure provides a kit comprising a humanized anti-CD19 switch disclosed herein comprising a CAR-ID. In some embodiments, the disclosure provides a kit comprising a CAR-EC switch disclosed herein comprising a GCN4 derivative disclosed herein. In some embodiments, the disclosure provides a kit comprising an anti-CD19 switch disclosed herein comprising a GCN4 derivative disclosed herein. In some embodiments, the disclosure provides a kit comprising a humanized anti-CD19 switch disclosed herein comprising a GCN4 derivative disclosed herein. In some embodiments, the kit comprises a CAR-EC switch comprising a targeting moiety selected from an anti-CD19 antibody, an anti-CD20 antibody, an anti-CD22 antibody, an anti-EGFR antibody, an anti-EGFRvIII antibody, an anti-Her2 antibody, an anti-CS1 antibody, an anti-BCMA antibody, an anti-CEA antibody, an anti-CLL1 antibody, an anti-CD33 antibody, an anti-CD123 antibody, antigen binding portions of the aforementioned antibodies, and, optionally, humanized forms of the aforementioned antibodies (such as, e.g., any one of the humanized anti-CD19 antibodies disclosed herein).

[0440] In some embodiments, the kit comprises a CAR-EC switch or a pharmaceutical composition comprising such a switch, wherein the CAR-EC switch comprises a light chain and a heavy chain, wherein the light chain comprises or consists of any switch light chain sequence disclosed herein and the heavy chain comprises or consists of any switch heavy chain sequence disclosed herein. Such heavy and/or light chain sequences may be humanized. In some embodiments, the CAR-EC switch comprised in the kit is humanized and comprises a light chain sequence selected from SEQ ID NOS: 17-24 and a heavy chain sequence selected from SEQ ID NOS: 2-14, wherein one or both of the heavy and light chains comprise a CAR-ID disclosed herein (e.g., a GCN4 CAR-ID). In some particular embodiments, the light chain sequence comprises a humanized sequence selected from SEQ ID NOS: 27-34 (which comprise an N-terminal GCN4 CAR-ID) and a heavy chain sequence selected from SEQ ID NOS: 2-14. In some particular embodiments, the switch is a switch described in Table 6 or Table 8, which presents heavy chain/light chain combinations comprised in several of the switches disclosed herein. In some embodiments, the switch is identical to a switch described in Table 6 or Table 8, except that the CAR-ID comprised in the switch is modified to have a sequence of Structure I. In some embodiments, the sequence of Structure I is selected from any one of SEQ ID NOS: 26, 36, 139, and 154-163. The kit may comprise a single switch or a pharmaceutical composition comprising a single switch. The kit may comprise a plurality of switches or a pharmaceutical composition comprising a plurality of switches.

[0441] The kit may comprise two or more switches. The kit may comprise three switches. The kit may comprise about 3, 4, 5, 6, 7, 8, 9, 10, 12, 15, 20, 24, 30, 35, 48, 50, 55, 60, 65, 70, 75, 80, 85, 90, 96, 100, 120, 150, 200, 300, 384, 400, 500, 600, 700, 800, 900 or 1000 switches. The kit may be employed for biological research. The kit may be used for diagnosing a disease or a condition. The kit may be used for treating a disease or condition. The switches of the kit may be used with effector cells disclosed herein (e.g., CAR-ECs) or existing CAR T-cells clinically used or tested. The kit may comprise one or more effector cells. The effector cell may be a CAR-EC. The effector cell may be a T cell. The T cell may express one or more chimeric receptors. The T cell may be a CAR-T cell. The CAR-EC may bind the CAR-ID on the switch. The CAR-EC may bind a CAR-ID on the switch that is a peptide (e.g., a GCN4 peptide disclosed herein, a flag peptide disclosed herein, an alpha helix peptide that forms a coiled coil structure with another alpha helix peptide disclosed herein). The CAR-EC may bind a CAR-ID that is a small molecule (e.g., FITC). The CAR-T cell may bind the CAR-ID on the switch. The CAR-T cell may bind a CAR-ID on the switch that is a peptide (e.g., a GCN4 peptide or GCN4 derivative disclosed herein, a flag peptide disclosed herein, an alpha helix peptide that forms a coiled coil structure with another alpha helix peptide disclosed herein). The CAR-T cell may bind a CAR-ID that is a small molecule (e.g., FITC).

[0442] The kit may comprise a polynucleotide encoding one or more chimeric receptors (e.g., one or more chimeric receptors described herein). The kit may comprise a polynucleotide encoding one or more chimeric antigen receptors (e.g., one or more chimeric antigen receptors described herein). The kit may comprise a vector comprising a polynucleotide encoding one or more chimeric receptors. The chimeric receptor may be selected from any of the chimeric receptors disclosed herein. The chimeric receptor may be selected from any of the chimeric antigen receptors disclosed herein. The chimeric receptor may have any CAR sequence disclosed herein. The CAR may be humanized to reduce immunogenicity to humans. The CAR may comprise an extracellular domain that is humanized. The humanization may reduce immunogenicity of the CAR to humans while retaining the specificity and affinity of the extracellular domain for the CAR-EC switch. The CAR may be a humanized version of any one of the CAR sequences provided in Table 13. The CAR may be a humanized version of any one of SEQ ID NOS: 270-289. The CAR may be a humanized CAR comprising an extracellular domain that comprises an antibody or antibody fragment that binds to a CAR-ID of a CAR-EC switch. The antibody or antibody fragment may be humanized. The antibody fragment may be a scFv (e.g., a humanized scFv). The scFv or humanized scFv may comprise or consist of the general structure light chain-linker-heavy chain. The scFv or humanized scFv may comprise or consist of the general structure heavy chain-linker-light chain. The humanized scFv may comprise a humanized VH (variable heavy chain) sequence with non-human (e.g., murine) CDRs transplanted onto a human immunoglobulin framework. In some particular embodiments, the CAR comprises a structure selected from constructs A-H in FIG. 24A. In certain embodiments, the CAR comprises a structure according to construct A, construct B, or construct C in FIG. 24. In certain embodiments, the CAR is selected from the CARs described in Table 11. In certain particular embodiments, the CAR is selected from the CARs described in Table 12. The kit may comprise one or more polynucleotides encoding a chimeric receptor-EC switch disclosed herein or a portion thereof (e.g., antibody, antibody fragment, peptide).

[0443] Disclosed herein are vectors and polynucleotides encoding switches and portions thereof, wherein the switch comprises a GCN4 derivative and a polypeptide targeting moiety (e.g., a targeting protein or targeting peptide). Disclosed herein are and vectors and polynucleotides encoding humanized switches and portions thereof, wherein the switch comprises a CAR-ID and a humanized polypeptide targeting moiety (e.g., a targeting protein or targeting peptide). Disclosed herein are vectors and polynucleotides encoding switches and portions thereof, wherein the switch comprises a CAR-ID and a humanized polypeptide targeting moiety (e.g., a targeting protein or targeting peptide), wherein the polypeptide targeting moiety binds CD19 on a target cell. Disclosed herein are vectors and polynucleotides encoding switches and portions thereof, wherein the switch comprises a GCN4 derivative and a humanized polypeptide targeting moiety (e.g., a targeting protein or targeting peptide), wherein the polypeptide targeting moiety binds CD19 on a target cell. The polynucleotides may be DNA (e.g., cDNA). The polynucleotides may be RNA. In some embodiments, the targeting polypeptide may be a humanized anti-CD19 antibody or a CD19-binding fragment thereof. In some embodiments, the CAR-ID is a GCN4 peptide derivative disclosed herein. The vector may comprise a sequence encoding a heavy chain of the humanized anti-CD19 antibody or the CD19-binding fragment thereof. The vector may comprise a sequence encoding a light chain of the humanized anti-CD19 antibody or the CD19-binding fragment thereof. The vectors may comprise a sequence encoding a light chain of the humanized anti-CD19 antibody or the CD19-binding fragment thereof and a sequence encoding a heavy chain of the humanized anti-CD19 antibody or the CD19-binding fragment thereof. The light chain and the heavy chain may be expressed from the same vector. The light chain and the heavy chain may be expressed from two separate vectors. The heavy chain may comprise a humanized sequence. The light chain may comprise a humanized sequence. The heavy chain and the light chain may comprise a humanized sequence.

[0444] In some embodiments, the kits provide vectors and polynucleotides encoding chimeric receptors (e.g., CARs), wherein the CARs comprise an extracellular domain that binds to a peptide of a CAR-EC switch. The extracellular domain may comprise an antibody or antibody fragment. The antibody or antibody fragment may bind a CAR-ID of a CAR-EC. The CAR-ID may be a small molecule. The CAR-ID may be a hapten. The CAR-ID may be FITC or a derivative thereof. The CAR-ID may be a peptide. The CAR-ID may be a GCN4 peptide. The CAR-ID may be a GCN4 peptide that does not dimerize. The CAR-ID may be a GCN4 peptide disclosed herein. The CAR-ID may be a GCN4 peptide derivative. The CAR-ID may comprise a sequence of Structure I: X1 NYHLENEVARLKX2X3 (SEQ ID NO: 269), wherein X1, X2, and X3 are optionally any amino acid or absent. The CAR-ID may comprise the sequence: NYHLENEVARLK (SEQ ID NO: 145). In some embodiments, the CAR-ID comprises or consists of a sequence selected from any one of SEQ ID NOS: 139, 154-163.

[0445] In some embodiments, the kits provide vectors and polynucleotides encoding chimeric receptors, wherein the chimeric receptors comprise a non-antibody extracellular domain. The non-antibody extracellular domain may not comprise an antibody or antibody fragment. The non-antibody extracellular domain may comprise a non-antibody protein. The non-antibody extracellular domain may comprise a non-antibody peptide. In some embodiments polynucleotide may have a sequence selected from SEQ ID NO: 68-84, 87-90, 104, and 181-183.

[0446] Vectors comprising sequences encoding chimeric receptors and/or chimeric receptor effector cell switches and portions thereof, disclosed herein, may be selected from any commercially available expression vector. The expression vector may be a prokaryotic expression vector. The expression vector may be a eukaryotic expression vector. The expression vector may be a mammalian expression vector. The expression vector may be a viral expression vector. The expression vector may have a constitutive promoter for constitutive expression of the chimeric receptor and/or switch encoding sequences. The expression vector may have an inducible promoter for conditional expression of the chimeric receptor and/or switch encoding sequences.

[0447] In some embodiments, the kit comprises (i) a CAR-EC switches comprising (a) a CAR-ID comprising a peptide from a yeast transcription factor GCN4 peptide; and (b) a humanized FMC63 antibody or an antigen binding portion thereof (e.g., any one of the humanized FMC63 antibodies described herein) and (ii) a CAR-EC expressing an anti-GCN4 CAR. The humanized FMC63 antibody or antibody fragment may comprise a heavy chain of a humanized FMC63 antibody. The heavy chain sequence may comprise any one of SEQ ID NOS: 2-15. The GCN4 may comprise a sequence of Structure I: X₁NYHLENEVARLKX2X3 (SEQ ID NO: 269), wherein X₁, X2, and X3 are all any amino acid or absent. The humanized FMC63 antibody or antibody fragment may comprise a light chain a humanized FMC63 antibody. The light chain sequence may comprise any one of SEQ ID NOS: 17-25 or any one of SEQ ID NOS: 27-35. The humanized FMC63 antibody or antibody fragment may comprise a Fab of a humanized FMC63 antibody. The humanized FMC63 antibody or antibody fragment may comprise a full length humanized FMC63 antibody or a fragment thereof. In some embodiments, use of the kit comprises co-treatment of a subject with (i) a CAR-EC switch comprising (a) a CAR-ID comprising a peptide from a yeast transcription factor peptide (e.g., a GCN4 peptide disclosed herein); and (b) a humanized FMC63 antibody or an antigen binding portion thereof (e.g., any one of the humanized FMC63 antibodies described herein) and (ii) a CAR-EC expressing an anti-GCN4 CAR, wherein the treatment results in switch mediated cytotoxicity of a CD19-expressing target cell.

[0448] In some embodiments, the kit comprises (i) a CAR-EC switches comprising (a) a CAR-ID comprising a Flag peptide; and (b) a humanized FMC63 antibody or an antigen binding portion thereof (e.g., any one of the humanized FMC63 antibodies described herein) and (ii) a CAR-EC expressing an anti-Flag peptide CAR. The Flag peptide may comprise any one of the following sequences: DYKDDDDK and DYKDDDDKP. The humanized FMC63 antibody or antibody fragment may comprise a heavy chain of a humanized FMC63 antibody. The heavy chain sequence may comprise any one of SEQ ID NOS: 2-15. The humanized FMC63 antibody or antibody fragment may comprise a light chain a humanized FMC63 antibody. The light chain sequence may comprise any one of SEQ ID NOS: 17-25 or any one of SEQ ID NOS: 27-35. The humanized FMC63 antibody or antibody fragment may comprise a Fab of a humanized FMC63 antibody. The humanized FMC63 antibody or antibody fragment may comprise a full length humanized FMC63 antibody or a fragment thereof. In some embodiments, use of the kit comprises co-treatment of a subject with (i) a CAR-EC switch comprising (a) a CAR-ID comprising a Flag peptide; and (b) a humanized FMC63 antibody or an antigen binding portion thereof (e.g., any one of the humanized FMC63 antibodies described herein) and (ii) a CAR-EC expressing an anti-Flag CAR, wherein the treatment results in switch mediated cytotoxicity of a CD19-expressing target cell.

[0449] In some embodiments, the kit comprises (i) a CAR-EC switches comprising (a) a CAR-ID comprising FITC; and (b) a humanized FMC63 antibody or an antigen binding portion thereof (e.g., any one of the humanized FMC63 antibodies described herein) and (ii) a CAR-EC expressing an anti-FITC peptide CAR. The FITC may be conjugated to the humanized FMC63 antibody non-specifically. The FITC may be conjugated to the humanized FMC63 antibody site-specifically. The site-specific conjugation may be to an artificial amino acid comprised in the humanized FMC63 antibody. The conjugation may be via a linker that links the humanized FMC63 antibody to the FITC. The humanized FMC63 antibody or antibody fragment may comprise a heavy chain of a humanized FMC63 antibody. The heavy chain sequence may comprise any one of SEQ ID NOS: 2-15. The humanized FMC63 antibody or antibody fragment may comprise a light chain a humanized FMC63 antibody. The light chain sequence may comprise any one of SEQ ID NOS: 17-25 or any one of SEQ ID NOS: 27-35. The humanized FMC63 antibody or antibody fragment may comprise a Fab of a humanized FMC63 antibody. The humanized FMC63 antibody or antibody fragment may comprise a full length humanized FMC63 antibody or a fragment thereof. In some embodiments, use of the kit comprises co-treatment of a subject with (i) a CAR-EC switch comprising (a) a CAR-ID comprising a FITC; and (b) a humanized FMC63 antibody or an antigen binding portion thereof (e.g., any one of the humanized FMC63 antibodies described herein) and (ii) a CAR-EC expressing an anti-FITC CAR, wherein the treatment results in switch mediated cytotoxicity of a CD19-expressing target cell.

[0450] In some embodiments, the kit comprises (i) a CAR-EC switches comprising (a) a CAR-ID comprising a K4 peptide; and (b) a humanized FMC63 antibody or an antigen binding portion thereof (e.g., any one of the humanized FMC63 antibodies described herein) and (ii) a CAR comprising an E4 extracellular domain. The K4 peptide may comprise the amino acid sequence: KVAALKEKVAALKEKVAALKEKVAALKE. The E4 peptide may comprise the amino acid sequence: EVAALEKEVAALEKEVAALEKEVAALEK. The humanized FMC63 antibody or antibody fragment may comprise a heavy chain of a humanized FMC63 antibody. The heavy chain sequence may comprise any one of SEQ ID NOS: 2-15. The humanized FMC63 antibody or antibody fragment may comprise a light chain a humanized FMC63 antibody. The light chain sequence may comprise any one of SEQ ID NOS: 17-25 or any one of SEQ ID NOS: 27-35. The humanized FMC63 antibody or antibody fragment may comprise a Fab of a humanized FMC63 antibody. The humanized FMC63 antibody or antibody fragment may comprise a full length humanized FMC63 antibody or a fragment thereof. In some embodiments, use of the kit comprises co-treatment of a subject with (i) a CAR-EC switch comprising (a) a CAR-ID comprising a K4 peptide; and (b) a humanized FMC63 antibody or an antigen binding portion thereof (e.g., any one of the humanized FMC63 antibodies described herein) and (ii) a CAR-EC expressing a CAR comprising an E4 extracellular domain, wherein the treatment results in switch mediated cytotoxicity of a CD19-expressing target cell.

[0451] In some embodiments, the kit comprises (i) a CAR-EC switches comprising (a) a CAR-ID comprising a E4 peptide; and (b) a humanized FMC63 antibody or an antigen binding portion thereof (e.g., any one of the humanized FMC63 antibodies described herein) and (ii) a CAR comprising an K4 extracellular domain. The K4 peptide may comprise the amino acid sequence: KVAALKEKVAALKEKVAALKEKVAALKE. The E4 peptide may comprise the amino acid sequence: EVAALEKEVAALEKEVAALEKEVAALEK. The humanized FMC63 antibody or antibody fragment may comprise a heavy chain of a humanized FMC63 antibody. The heavy chain sequence may comprise any one of SEQ ID NOS: 2-15. The humanized FMC63 antibody or antibody fragment may comprise a light chain a humanized FMC63 antibody. The light chain sequence may comprise any one of SEQ ID NOS: 17-25 or any one of SEQ ID NOS: 27-35. The humanized FMC63 antibody or antibody fragment may comprise a Fab of a humanized FMC63 antibody. The humanized FMC63 antibody or antibody fragment may comprise a full length humanized FMC63 antibody or a fragment thereof. In some embodiments, use of the kit comprises co-treatment of a subject with (i) a CAR-EC switch comprising (a) a CAR-ID comprising a E4 peptide; and (b) a humanized FMC63 antibody or an antigen binding portion thereof (e.g., any one of the humanized FMC63 antibodies described herein) and (ii) a CAR-EC expressing a CAR comprising an K4 extracellular domain, wherein the treatment results in switch mediated cytotoxicity of a CD19-expressing target cell.

### VIII Therapeutic Use

[0452] Disclosed herein are methods, platforms and kits for treating a disease or condition in a subject in need thereof, the method comprising administering a chimeric antigen receptor effector cell (CAR-EC) switch to the subject, wherein the CAR-EC switch comprises: a CAR-ID and a targeting moiety. Such methods may further comprise administering a CAR-EC expressing a CAR that is complementary to the CAR-EC switch. The CAR-EC switch may be humanized. The CAR may be humanized.

[0453] Disclosed herein are methods, platforms and kits for treating a disease or condition in a subject in need thereof, the method comprising administering a chimeric antigen receptor effector cell (CAR-EC) switch to the subject, wherein the CAR-EC switch comprises: a GCN4 derivative disclosed herein and a targeting moiety (a “GCN4-switch”). Such methods may further comprise administering a CAR-EC expressing a CAR that is complementary to the GCN4-switch. The CAR-EC switch may be humanized. The CAR may be humanized.

[0454] Disclosed herein are methods, platforms and kits for treating a disease or condition in a subject in need thereof, the method comprising administering a chimeric antigen receptor effector cell (CAR-EC) switch to the subject, wherein the CAR-EC switch comprises: a GCN4 derivative disclosed herein and a targeting moiety that comprises or consists of an anti-CD19 antibody, or a CD19 binding portion thereof (an “anti-CD19 GCN4-switch”). The CD19 binding portion of the anti-CD19 antibody may be a scFv. The anti-CD19 GCN4-switch may be an LCNT switch. The anti-CD19 GCN4-switch may comprise a light chain and a heavy chain, wherein the light chain comprises or consists of any switch light chain sequence disclosed herein and the heavy chain comprises or consists of any switch heavy chain sequence disclosed herein. Such heavy and/or light chain sequences may be humanized.

[0455] Disclosed herein are methods, platforms and kits for treating a disease or condition in a subject in need thereof, the method comprising administering a chimeric antigen receptor effector cell (CAR-EC) switch to the subject, wherein the CAR-EC switch comprises: a GCN4 derivative disclosed herein and a targeting moiety that comprises or consists of a humanized anti-CD19 antibody, or a CD19 binding portion thereof. In some embodiments, the CAR-EC switch is humanized and comprises a light chain sequence selected from SEQ ID NOS: 17-24 and a heavy chain sequence selected from SEQ ID NOS: 2-14, wherein one or both of the heavy and light chains comprise a CAR-ID disclosed herein (e.g., a GCN4 CAR-ID). In particular embodiments, the light chain sequence comprises a humanized sequence selected from SEQ ID NOS: 27-34 (which comprise an N-terminal GCN4 CAR-ID) and a heavy chain sequence selected from SEQ ID NOS: 2-14. In particular embodiments, the switch is a switch described in Table 6 or Table 8, which presents heavy chain/light chain combinations comprised in several of the switches disclosed herein. In some embodiments, the switch is identical to a switch described in Table 6 or Table 8, except that the CAR-ID comprised in the switch is modified to have a sequence of Structure I. In some embodiments, the sequence of Structure I is selected from any one of SEQ ID NOS: 26, 36, 139, and 154-163. Such methods may further comprise administering a CAR-EC expressing a CAR that is complementary to the anti-CD19 GCN4-switch. The CAR may be humanized.

[0456] Disclosed herein are methods, platforms and kits for treating a disease or condition in a subject in need thereof, the method comprising administering a chimeric antigen receptor effector cell (CAR-EC) switch to the subject, wherein the CAR-EC switch comprises: a CAR-ID and a targeting moiety that comprises or consists of a humanized anti-CD19 antibody, or a CD19 binding portion thereof (an “anti-CD19 CAR-EC-switch”). The CD19 binding portion of the anti-CD19 antibody may be a scFv. The anti-CD19 CAR-EC switch may be an LCNT switch comprising an N-terminal CAR-ID. The anti-CD19 CAR-EC-switch may comprise a light chain and a heavy chain, wherein the light chain comprises or consists of any switch light chain sequence disclosed herein and the heavy chain comprises or consists of any switch heavy chain sequence disclosed herein. Such heavy and/or light chain sequences may be humanized. Such methods may further comprise administering a CAR-EC expressing a CAR that is complementary to the anti-CD19 CAR-EC-switch. The CAR may be humanized.

[0457] Disclosed herein are methods of treating a disease or condition in a subject in need thereof, the method comprising administering any one of the CAR-EC switches disclosed herein. Disclosed herein are methods of treating a disease or condition in a subject in need thereof, the method comprising administering any one of the CAR-EC switches disclosed herein and further administering a CAR-EC comprising a CAR that is complementary to the CAR-EC switch (i.e., the CAR comprises an extracellular domain with binding affinity for the CAR-ID comprised on the complementary CAR-EC switch).

[0458] In any of the methods disclosed herein of treating a disease or condition in a subject in need thereof, the CAR may be a CAR disclosed herein. The CAR may have any CAR sequence disclosed herein. The CAR may be humanized to reduce immunogenicity to humans. The CAR may comprise an extracellular domain that is humanized. The humanization may reduce immunogenicity of the CAR to humans while retaining the specificity and affinity of the extracellular domain for the CAR-EC switch. The CAR may be a humanized version of any one of the CAR sequences provided in Table 13 or it may be a humanized version of any one of SEQ ID NOS: 270-289. The CAR may be a humanized CAR comprising an extracellular domain that comprises an antibody or antibody fragment that binds to a CAR-ID of a CAR-EC switch. The antibody or antibody fragment may be humanized. The antibody fragment may be a scFv (e.g., a humanized scFv). The scFv or humanized scFv may comprise or consist of the general structure light chain-linker-heavy chain. The scFv or humanized scFv may comprise or consist of the general structure heavy chain-linker-light chain. The humanized scFv may comprise a humanized VH (variable heavy chain) sequence with non-human (e.g., murine) CDRs transplanted onto a human immunoglobulin framework. The humanized scFv may comprise a humanized VL (variable light chain) sequence with non-human (e.g., murine) CDRs transplanted onto a human immunoglobulin framework. In some particular embodiments, the CAR comprises a structure selected from constructs A-H in FIG. 24A. In certain embodiments, the CAR comprises a structure according to construct A, construct B, or construct C in FIG. 24. In certain embodiments, the CAR is selected from the CARs described in Table 11. In certain particular embodiments, the CAR is selected from the CARs described in Table 12. In certain embodiments, the extracellular domain of the CAR comprises a humanized scFv sequence selected from any one of SEQ ID NOS: 290-388, and 423.

[0459] In any of the methods disclosed herein of treating a disease or condition in a subject in need thereof, the disease or condition may be cancer. In some embodiments, the humanized anti-CD19 antibody, or a CD19 binding portion thereof comprises a light chain sequence and a heavy chain sequence. In some embodiments, the humanized anti-CD19 antibody, or a CD19 binding portion thereof comprises a humanized FMC63 antibody, or CD19 binding portion thereof. In some embodiments, the light chain sequence of the humanized anti-CD19 antibody, or a CD19 binding portion thereof, may comprise any one of SEQ ID NOS: 17-25 or any one of SEQ ID NOS: 27-35 and, alternatively or additionally, the heavy chain sequence may comprise any one of SEQ ID NOS: 2-15.

[0460] The methods disclosed herein of treating a disease or condition in a subject in need thereof may comprise administering a CAR-EC cell and one or more CAR-EC switches. The methods may comprise administering about 1, 2, 3, 4, 5, 6, 7, 8, 9, 10, 12, 15, 20, 24, 30, 35, 48, 50, 55, 60, 65, 70, 75, 80, 85, 90, 96, 100, 120, 150, 200, 300, 384, 400, 500, 600, 700, 800, 900, 1000 or more CAR-EC switches. The methods may comprise administering two or more CAR-EC switches. The two or more CAR-EC switches may comprise the same CAR-ID. The two more CAR-EC switches may comprise the same humanized anti-CD19 targeting moiety. The two or more CAR-EC switches may comprise one or more different CAR-IDs. The two more CAR-EC switches may comprise one or more different humanized anti-CD19 targeting moieties. The methods may comprise administering a plurality of CAR-EC cells and one or more CAR-EC switches. Administering the CAR-EC cell may comprise intravenous CAR-EC delivery. Administering the CAR-EC cell may comprise intraperitoneal CAR-EC delivery. Administering the CAR-EC cell may comprise intravenous CAR-EC delivery and intraperitoneal CAR-EC delivery. Administering the CAR-EC cell may occur once.

[0461] Administering the CAR-EC cell may occur more than once (e.g., repeat injection). The CAR-ECs may be sorted to enrich a memory population of CAR-ECs before administering the CAR-ECs. The CAR-ECs may be subjected to iterative stimulation to enrich the memory population, as opposed to recursive stimulation which promotes exhaustion, provide for a long-lived, persistent phenotype. This rationale is based on natural acute infections with enrich long-lived memory cells through a 1-2 week long contraction phase that occurs after the challenge has been cleared. Similarly, the sCAR-T cell system in which adoptively transferred cells are rested following stimulation may more closely recapitulate a physiological duration of T cell activation.

[0462] Disclosed herein are methods of treating a disease or condition in a subject in need thereof, the method comprising administering a chimeric antigen receptor effector cell (CAR-EC) switch to the subject, wherein the CAR-EC switch comprises: a chimeric antigen receptor interacting domain (CAR-ID); and a humanized targeting moiety that binds CD19 on a target. The CAR-ID, by non-limiting example, may be selected from a FLAG® tag, a yeast transcription factor GCN4 (e.g., 7p14p GCN4, a hydrophilic target peptide (HTP), a peptide that forms an alpha helix. The targeting moiety, by non-limiting example may be selected from any of the humanized anti-CD19 antibodies disclosed herein.

[0463] The methods may comprise administering one or more chimeric antigen receptor effector cells to a subject in need thereof and then administering one or CAR-EC switches to a subject in need thereof. The amount or dose of CAR-EC switch may affect the magnitude of the chimeric antigen receptor effector cells toward the target cells, therefore the amount or dose of the CAR-EC switch may be titrated for a desired effect. For example, tumors may be targeted by titration of CAR-EC switch to achieve suitable therapeutic index. The response may be titrated “on” to avoid CRS (cytokine release syndrome) and TLS (tumor lysis syndrome) events, providing for personalized therapy. Furthermore, administration of a switch can be terminated in case of an adverse event, control of CAR-EC cell activity, titration of on-target off tumor reactivity or off target reactivity, abrogation of tumor lysis syndrome (TLS), or attenuation of cytokine release syndrome (CRS). The amount or dose may start at one level for a specified time period and then the amount or dose may be increased or decreased to a second level for a second specified time period. For example, the initial amount or dose of the CAR-EC switch may be the lowest dose necessary to eliminate the tumor. The amount or dose of the CAR-EC switch may then be increased to a larger dose in order to eliminate any remaining tumor cells. The methods may comprise terminating the administration of the CAR-EC switch once the tumor cells are eliminated. The methods may comprise re-administering the CAR-EC switch if the tumor cells re-occur in the patient or if the patient relapses.

[0464] The methods may comprise titrating the CAR-EC switch for a desired effect. Titrating the CAR-EC switch may enable antigen density discrimination. For example, the fatal on-target, off-tumor reactivity for Her2 targeted CAR-T cells to low levels of Her2 expression in the lung has tempered the application of CAR-T cells to solid tumors in the clinic. The use of a Fab-based switch that is expected to have a half-life of approximately 10 h in human allows a more rapid decrease in activity than long-live IgG-based molecules. The methods described herein may comprise titrating a switch to an optimal level wherein the switch activity may be affected by the density of the target antigen on the target cell, thereby discriminating or distinguishing the target antigen (and switch activity) on cancer cells from the target antigen on healthy tissue. In the clinic, this may be used to titrate therapy to an appropriate therapeutic index. Additionally, it may be possible in patients to decouple infusion of sCAR-T cells from activation by administering the switch only after adoptively transferred sCAR-T cells have cleared a tissue, thus mitigating potential toxicities to the tissue. For example, studies have shown that transferred cytotoxic T cells immediately accumulate in the lung, but the accumulation clears over 72 hours. One advantage of sCAR-T cells is that they can be transferred and the switch dose can be delayed until the sCAR-T cells have cleared the lung, during which time, the sCAR-T cells are inert. Once cleared, switch may be administered to activate the sCAR-T upon binding of the switch to the CAR and the target antigen. One skilled in the art would readily understand how this concept would apply to other antigens besides Her2 that are expressed on cells at varying densities.

[0465] The methods may comprise administering one or more chimeric antigen receptor effector cells. The methods may comprise administering one or more T cells. The one or more effector cells may be selected from a naive T cell, a memory stem cell T cell, a central memory T cell, an effector memory T cell, a helper T cell, a CD4+ T cell, a CD8+ T cell (cytotoxic T cell), a CD8/CD4+ T cell, an αβ T cell, a γδ T cell, a natural killer T cell, a natural killer cell, a macrophage.

[0466] The CAR-EC switch may have a therapeutic effect that is at least partially dependent on bringing an effector cell in proximity of a target cell. The therapeutic effect on the intended indication of the CAR-EC switch may be at least partially due to the CAR-EC switch recruiting an effector cell to the target cell. The therapeutic effect on the intended indication of the CAR-EC switch may be predominantly due to the CAR-EC switch recruiting an effector cell to the target cell. The therapeutic effect of the CAR-EC switch may be at least partially dependent on stimulating an immune response in the CAR-EC cell.

[0467] Administering the CAR-EC switch may not have any therapeutic effect without further administering an effector cell. The CAR-EC switch may not have a significant, desirable and/or intended therapeutic effect without further administering an effector cell. The CAR-EC switch may not have any therapeutic effect towards an intended indication of the CAR-EC platform without further administering an effector cell. A portion or component of the CAR-EC switch (e.g., CAR-ID or targeting moiety) may not have a therapeutic effect towards the intended indication of the CAR-EC switch without being conjugated to a second portion or component of the CAR-EC switch (e.g., CAR-ID or targeting moiety). The dose of a portion or component of the CAR-EC switch (e.g., CAR-ID or targeting moiety) when administered as part of the CAR-EC platform to provide a therapeutic effect may not have a therapeutic effect when the portion or component of the CAR-EC switch is administered alone at that dose. The portion or component of the CAR-EC switch may not be intended to have any therapeutic effect besides recruiting the T cell to the target cell. Administering the portion or component of the CAR-EC switch alone may have a therapeutic effect on the target cell, wherein the therapeutic effect is negligible relative to the therapeutic effect of administering the CAR-EC switch and the CAR-EC cell. Administering the portion or component of the CAR-EC switch may have a therapeutic effect on the target cell, wherein the therapeutic effect is less than the therapeutic effect of administering the CAR-EC switch and the CAR-EC cell.

[0468] Disclosed herein are uses of CAR-EC switches disclosed herein to treat a disease or condition in a subject in need thereof. Further disclosed herein are uses of CAR-EC switches disclosed herein in the manufacture of a medicament for the treatment of a disease.

[0469] Disclosed herein is use of a switch comprising a peptidic antigen that binds a CAR (CAR-ID) on an effector cell; and a targeting polypeptide that binds an antigen on a target to treat a disease or condition in a subject in need thereof. Further disclosed herein is use of a switch comprising a peptidic antigen (CAR-ID) that binds a CAR on an effector cell, wherein the CAR-ID; and a targeting polypeptide that binds an antigen on a target in the manufacture of a medicament for the treatment of a disease.

[0470] Disclosed herein is use of a CAR-EC switch comprising a CAR-ID, wherein the CAR-ID comprises a low immunogenicity peptide (e.g., FLAG) or derivative thereof and a targeting polypeptide, wherein the targeting polypeptide comprises an anti-CD19 antibody or fragment thereof and an effector cell comprising a CAR, wherein the CAR comprises an anti-low immunogenicity peptide antibody, wherein the anti-CD19 antibody or fragment thereof binds CD19 on a B cell to treat a multiple myeloma. Notably, no previously reported antibody-based control system has reported targeting of CD19 in vivo. As reported herein, sCAR-T cell platforms were able to eliminate Nalm-6^{Luc/GFP} in vivo with comparable efficacy to conventional CART-19. Efficacy was reliant on optimal target cell engagement. More specifically, differences in the in vitro lytic activity of switch/hinge designs which were generally less than 10 fold in EC₅₀ were decisive for in vivo tumor elimination.

[0471] Disclosed herein is use of a CAR-EC switch comprising a CAR-ID, wherein the CAR-ID comprises a yeast transcription factor GCN4 or derivative thereof and a targeting polypeptide, wherein the targeting polypeptide comprises an anti-CD19 antibody or fragment thereof and an effector cell comprising a CAR, wherein the CAR comprises an anti-GCN4 antibody, wherein the anti-CD19 antibody or fragment thereof binds CD19 on a lymphoblast, lymphocyte or B cell, to treat an acute lymphoblastic leukemia, a chronic lymphocytic leukemia or a B-cell lymphoma.

[0472] The disease or condition may be a cell proliferative disorder. The cell proliferative disorder may be selected from a solid tumor, a lymphoma, a leukemia and a liposarcoma. The cell proliferative disorder may be acute, chronic, recurrent, refractory, accelerated, in remission, stage I, stage II, stage III, stage IV, juvenile or adult. The cell proliferative disorder may be selected from myelogenous leukemia, lymphoblastic leukemia, myeloid leukemia, an acute myeloid leukemia, myelomonocytic leukemia, neutrophilic leukemia, myelodysplastic syndrome, B-cell lymphoma, burkitt lymphoma, large cell lymphoma, mixed cell lymphoma, follicular lymphoma, mantle cell lymphoma, hodgkin lymphoma, recurrent small lymphocytic lymphoma, hairy cell leukemia, multiple myeloma, basophilic leukemia, eosinophilic leukemia, megakaryoblastic leukemia, monoblastic leukemia, monocytic leukemia, erythroleukemia, erythroid leukemia and hepatocellular carcinoma. The cell proliferative disorder may comprise a hematological malignancy. The hematological malignancy may comprise a B cell malignancy. The cell proliferative disorder may comprise a chronic lymphocytic leukemia. The cell proliferative disorder may comprise an acute lymphoblastic leukemia. The cell proliferative disorder may comprise a CD19-positive Burkitt's lymphoma.

[0473] The disease or condition may be a cancer, a pathogenic infection, autoimmune disease, inflammatory disease, or genetic disorder.

[0474] In some instances, the one or more diseases comprise a cancer. The cancer may comprise a recurrent and/or refractory cancer. Examples of cancers include, but are not limited to, sarcomas, carcinomas, lymphomas or leukemias.

[0475] The cancer may comprise a neuroendocrine cancer. The cancer may comprise a pancreatic cancer. The cancer may comprise an exocrine pancreatic cancer. The cancer may comprise a thyroid cancer. The thyroid cancer may comprise a medullary thyroid cancer. The cancer may comprise a prostate cancer.

[0476] The cancer may comprise an epithelial cancer. The cancer may comprise a breast cancer. The cancer may comprise an endometrial cancer. The cancer may comprise an ovarian cancer. The ovarian cancer may comprise a stromal ovarian cancer. The cancer may comprise a cervical cancer.

[0477] The cancer may comprise a skin cancer. The skin cancer may comprise a neo-angiogenic skin cancer. The skin cancer may comprise a melanoma.

[0478] The cancer may comprise a kidney cancer.

[0479] The cancer may comprise a lung cancer. The lung cancer may comprise a small cell lung cancer. The lung cancer may comprise a non-small cell lung cancer.

[0480] The cancer may comprise a colorectal cancer. The cancer may comprise a gastric cancer. The cancer may comprise a colon cancer.

[0481] The cancer may comprise a brain cancer. The brain cancer may comprise a brain tumor.

[0482] The cancer may comprise a glioblastoma. The cancer may comprise an astrocytoma.

[0483] The cancer may comprise a blood cancer. The blood cancer may comprise a leukemia. The leukemia may comprise a myeloid leukemia. The cancer may comprise a lymphoma. The lymphoma may comprise a non-Hodgkin's lymphoma.

[0484] The cancer may comprise a sarcoma. The sarcoma may comprise an Ewing's sarcoma.

[0485] Sarcomas are cancers of the bone, cartilage, fat, muscle, blood vessels, or other connective or supportive tissue. Sarcomas include, but are not limited to, bone cancer, fibrosarcoma, chondrosarcoma, Ewing's sarcoma, malignant hemangioendothelioma, malignant schwannoma, bilateral vestibular schwannoma, osteosarcoma, soft tissue sarcomas (e.g., alveolar soft part sarcoma, angiosarcoma, cystosarcoma phylloides, dermatofibrosarcoma, desmoid tumor, epithelioid sarcoma, extraskeletal osteosarcoma, fibrosarcoma, hemangiopericytoma, hemangiosarcoma, Kaposi's sarcoma, leiomyosarcoma, liposarcoma, lymphangiosarcoma, lymphosarcoma, malignant fibrous histiocytoma, neurofibrosarcoma, rhabdomyosarcoma, and synovial sarcoma).

[0486] Carcinomas are cancers that begin in the epithelial cells, which are cells that cover the surface of the body, produce hormones, and make up glands. By way of non-limiting example, carcinomas include breast cancer, pancreatic cancer, lung cancer, colon cancer, colorectal cancer, rectal cancer, kidney cancer, bladder cancer, stomach cancer, prostate cancer, liver cancer, ovarian cancer, brain cancer, vaginal cancer, vulvar cancer, uterine cancer, oral cancer, penile cancer, testicular cancer, esophageal cancer, skin cancer, cancer of the fallopian tubes, head and neck cancer, gastrointestinal stromal cancer, adenocarcinoma, cutaneous or intraocular melanoma, cancer of the anal region, cancer of the small intestine, cancer of the endocrine system, cancer of the thyroid gland, cancer of the parathyroid gland, cancer of the adrenal gland, cancer of the urethra, cancer of the renal pelvis, cancer of the ureter, cancer of the endometrium, cancer of the cervix, cancer of the pituitary gland, neoplasms of the central nervous system (CNS), primary CNS lymphoma, brain stem glioma, and spinal axis tumors. In some instances, the cancer is a skin cancer, such as a basal cell carcinoma, squamous, melanoma, nonmelanoma, or actinic (solar) keratosis.

[0487] In some instances, the cancer is a lung cancer. Lung cancer may start in the airways that branch off the trachea to supply the lungs (bronchi) or the small air sacs of the lung (the alveoli). Lung cancers include non-small cell lung carcinoma (NSCLC), small cell lung carcinoma, and mesotheliomia. Examples of NSCLC include squamous cell carcinoma, adenocarcinoma, and large cell carcinoma. The mesothelioma may be a cancerous tumor of the lining of the lung and chest cavity (pleura) or lining of the abdomen (peritoneum). The mesothelioma may be due to asbestos exposure. The cancer may be a brain cancer, such as a glioblastoma.

[0488] Alternatively, the cancer may be a central nervous system (CNS) tumor. CNS tumors may be classified as gliomas or nongliomas. The glioma may be malignant glioma, high grade glioma, diffuse intrinsic pontine glioma. Examples of gliomas include astrocytomas, oligodendrogliomas (or mixtures of oligodendroglioma and astocytoma elements), and ependymomas. Astrocytomas include, but are not limited to, low-grade astrocytomas, anaplastic astrocytomas, glioblastoma multiforme, pilocytic astrocytoma, pleomorphic xanthoastrocytoma, and subependymal giant cell astrocytoma. Oligodendrogliomas include low-grade oligodendrogliomas (or oligoastrocytomas) and anaplastic oligodendriogliomas. Nongliomas include meningiomas, pituitary adenomas, primary CNS lymphomas, and medulloblastomas. In some instances, the cancer is a meningioma.

[0489] The leukemia may be an acute lymphocytic leukemia, acute myelocytic leukemia, chronic lymphocytic leukemia, or chronic myelocytic leukemia. Additional types of leukemias include hairy cell leukemia, chronic myelomonocytic leukemia, and juvenile myelomonocytic leukemia.

[0490] Lymphomas are cancers of the lymphocytes and may develop from either B or T lymphocytes. The two major types of lymphoma are Hodgkin's lymphoma, previously known as Hodgkin's disease, and non-Hodgkin's lymphoma. Hodgkin's lymphoma is marked by the presence of the Reed-Sternberg cell. Non-Hodgkin's lymphomas are all lymphomas which are not Hodgkin's lymphoma. Non-Hodgkin lymphomas may be indolent lymphomas and aggressive lymphomas. Non-Hodgkin's lymphomas include, but are not limited to, diffuse large B cell lymphoma, follicular lymphoma, mucosa-associated lymphatic tissue lymphoma (MALT), small cell lymphocytic lymphoma, mantle cell lymphoma, Burkitt's lymphoma, mediastinal large B cell lymphoma, Waldenstrom macroglobulinemia, nodal marginal zone B cell lymphoma (NMZL), splenic marginal zone lymphoma (SMZL), extranodal marginal zone B cell lymphoma, intravascular large B cell lymphoma, primary effusion lymphoma, and lymphomatoid granulomatosis.

[0491] The cancer may comprise a solid tumor. The cancer may comprise a sarcoma. The cancer may be selected from a group consisting of a bladder cancer, a breast cancer, a colon cancer, a rectal cancer, an endometrial cancer, a kidney cancer, a lung cancer, melanoma, a myeloma, a thyroid cancer, a pancreatic cancer, a glioma, a malignant glioma of the brain, a glioblastoma, an ovarian cancer, and a prostate cancer. The cancer may have non-uniform antigen expression. The cancer may have modulated antigen expression. The antigen may be a surface antigen. The cancer may not comprise a myeloma. The cancer may not comprise a melanoma. The cancer may not comprise a colon cancer. The cancer may be acute lymphoblastic leukemia (ALL). The cancer may be relapsed ALL. The cancer may be refractory ALL. The cancer may be relapsed, refractory ALL. The cancer may be chronic lymphocytic leukemia (CLL). The cancer may be relapsed CLL. The cancer may be refractory CLL. The cancer may be relapsed, refractory CLL.

[0492] The cancer may comprise a breast cancer. The breast cancer may be triple positive breast cancer (estrogen receptor, progesterone receptor and Her2 positive). The breast cancer may be triple negative breast cancer (estrogen receptor, progesterone receptor and Her2 negative). The breast cancer may be estrogen receptor positive. The breast cancer may be estrogen receptor negative. The breast cancer may be progesterone receptor positive. The breast cancer may be progesterone receptor negative. The breast cancer may comprise a Her2 negative breast cancer. The breast cancer may comprise a low-expressing Her2 breast cancer. The breast cancer may comprise a Her2 positive breast cancer. Cell lines expressing Her2 have been well-characterized for antigen density, reflecting clinical immunohistochemistry characterization which classifies malignancies as 0 (<20,000 Her2 antigens per cell), 1+(100,000 Her2 antigens per cell), 2+(500,000 Her2 antigens per cell), and 3+(>2,000,000 Her2 antigens per cell). The present invention provides for methods of treating breast cancers of these classifications. The breast cancer may comprise a breast cancer classified as Her2 0. The breast cancer may comprise a breast cancer classified as Her2 1+. The breast cancer may comprise a breast cancer classified as Her2 2+. The breast cancer may comprise a breast cancer classified as a Her2 3+.

[0493] The disease or condition may be a pathogenic infection. Pathogenic infections may be caused by one or more pathogens. In some instances, the pathogen is a bacterium, fungi, virus, or protozoan.

[0494] Exemplary pathogens include but are not limited to: Bordetella, Borrelia, Brucella, Campylobacter, Chlamydia, Chlamydophila, Clostridium, Corynebacterium, Enterococcus, Escherichia, Francisella, Haemophilus, Helicobacter, Legionella, Leptospira, Listeria, Mycobacterium, Mycoplasma, Neisseria, Pseudomonas, Rickettsia, Salmonella, Shigella, Staphylococcus, Streptococcus, Treponema, Vibrio, or Yersinia. In some cases, the disease or condition caused by the pathogen is tuberculosis and the heterogeneous sample comprises foreign molecules derived from the bacterium Mycobacterium tuberculosis and molecules derived from the subject. In some instances, the disease or condition is caused by a bacterium is tuberculosis, pneumonia, which may be caused by bacteria such as Streptococcus and Pseudomonas, a foodborne illness, which may be caused by bacteria such as Shigella, Campylobacter and Salmonella, and an infection such as tetanus, typhoid fever, diphtheria, syphilis and leprosy. The disease or condition may be bacterial vaginosis, a disease of the vagina caused by an imbalance of naturally occurring bacterial flora. Alternatively, the disease or condition is a bacterial meningitis, a bacterial inflammation of the meninges (e.g., the protective membranes covering the brain and spinal cord). Other diseases or conditions caused by bacteria include, but are not limited to, bacterial pneumonia, a urinary tract infection, bacterial gastroenteritis, and bacterial skin infection. Examples of bacterial skin infections include, but are not limited to, impetigo which may be caused by Staphylococcus aureus or Streptococcus pyogenes; erysipelas which may be caused by a streptococcus bacterial infection of the deep epidermis with lymphatic spread; and cellulitis which may be caused by normal skin flora or by exogenous bacteria.

[0495] The pathogen may be a fungus, such as, Candida, Aspergillus, Cryptococcus, Histoplasma, Pneumocystis, and Stachybotrys. Examples of diseases or conditions caused by a fungus include, but are not limited to, jock itch, yeast infection, ringworm, and athlete's foot.

[0496] The pathogen may be a virus. Examples of viruses include, but are not limited to, adenovirus, coxsackievirus, Epstein-Barr virus, Hepatitis virus (e.g., Hepatitis A, B, and C), herpes simplex virus (type 1 and 2), cytomegalovirus, herpes virus, HIV, influenza virus, measles virus, mumps virus, papillomavirus, parainfluenza virus, poliovirus, respiratory syncytial virus, rubella virus, and varicella-zoster virus. Examples of diseases or conditions caused by viruses include, but are not limited to, cold, flu, hepatitis, AIDS, chicken pox, rubella, mumps, measles, warts, and poliomyelitis.

[0497] The pathogen may be a protozoan, such as Acanthamoeba (e.g., A. astronyxis, A. castellanii, A. culbertsoni, A. hatchetti, A. polyphaga, A. rhysodes, A. healyi, A. divionensis), Brachiola (e.g., B connori, B. vesicularum), Cryptosporidium (e.g., C. parvum), Cyclospora (e.g., C. cayetanensis), Encephalitozoon (e.g., E. cuniculi, E. hellem, E. intestinalis), Entamoeba (e.g., E. histolytica), Enterocytozoon (e.g., E. bieneusi), Giardia (e.g., G. lamblia), Isospora (e.g, I. belli), Microsporidium (e.g., M. africanum, M. ceylonensis), Naegleria (e.g., N. fowleri), Nosema (e.g., N. algerae, N. ocularum), Pleistophora, Trachipleistophora (e.g., T. anthropophthera, T. hominis), and Vittaforma (e.g., V. corneae).

[0498] The disease or condition may be an autoimmune disease or autoimmune related disease. An autoimmune disorder may be a malfunction of the body's immune system that causes the body to attack its own tissues. Examples of autoimmune diseases and autoimmune related diseases include, but are not limited to, Addison's disease, alopecia areata, ankylosing spondylitis, antiphospholipid syndrome (APS), autoimmune aplastic anemia, autoimmune hemolytic anemia, autoimmune hepatitis, autoimmune myocarditis, Behcet's disease, celiac sprue, Crohn's disease, dermatomyositis, eosinophilic fasciitis, erythema nodosum, giant cell arteritis (temporal arteritis), Goodpasture's syndrome, Graves' disease, Hashimoto's disease, idiopathic thrombocytopenic purpura (ITP), IgA nephropathy, juvenile arthritis, diabetes, juvenile diabetes, Kawasaki syndrome, Lambert-Eaton syndrome, lupus (SLE), mixed connective tissue disease (MCTD), multiple sclerosis, myasthenia gravis, pemphigus, polyarteritis nodosa, type I, II, & III autoimmune polyglandular syndromes, polymyalgia rheumatica, polymyositis, psoriasis, psoriatic arthritis, Reiter's syndrome, relapsing polychondritis, rheumatoid arthritis, sarcoidosis, scleroderma, Sjogren's syndrome, sperm & testicular autoimmunity, stiff person syndrome, Takayasu's arteritis, temporal arteritis/giant cell arteritis, ulcerative colitis, uveitis, vasculitis, vitiligo, and Wegener's granulomatosis.

[0499] The disease or condition may be an inflammatory disease. Examples of inflammatory diseases include, but are not limited to, alveolitis, amyloidosis, angiitis, ankylosing spondylitis, avascular necrosis, Basedow's disease, Bell's palsy, bursitis, carpal tunnel syndrome, celiac disease, cholangitis, chondromalacia patella, chronic active hepatitis, chronic fatigue syndrome, Cogan's syndrome, congenital hip dysplasia, costochondritis, Crohn's Disease, cystic fibrosis, De Quervain's tendinitis, diabetes associated arthritis, diffuse idiopathic skeletal hyperostosis, discoid lupus, Ehlers-Danlos syndrome, familial mediterranean fever, fascitis, fibrositis/fibromyalgia, frozen shoulder, ganglion cysts, giant cell arteritis, gout, Graves' Disease, HIV-associated rheumatic disease syndromes, hyperparathyroid associated arthritis, infectious arthritis, inflammatory bowel syndrome/irritable bowel syndrome, juvenile rheumatoid arthritis, lyme disease, Marfan's Syndrome, Mikulicz's Disease, mixed connective tissue disease, multiple sclerosis, myofascial pain syndrome, osteoarthritis, osteomalacia, osteoporosis and corticosteroid-induced osteoporosis, Paget's Disease, palindromic rheumatism, Parkinson's Disease, Plummer's Disease, polymyalgia rheumatica, polymyositis, pseudogout, psoriatic arthritis, Raynaud's Phenomenon/Syndrome, Reiter's Syndrome, rheumatic fever, rheumatoid arthritis, sarcoidosis, sciatica (lumbar radiculopathy), scleroderma, scurvy, sickle cell arthritis, Sjogren's Syndrome, spinal stenosis, spondyloisthesis, Still's Disease, systemic lupus erythematosis, Takayasu's (Pulseless) Disease, Tendinitis, tennis elbow/golf elbow, thyroid associated arthritis, trigger finger, ulcerative colitis, Wegener's Granulomatosis, and Whipple's Disease.

[0500] Methods of treatment disclosed herein may comprise off-target activity as measured by cytokine levels. The method may reduce the off-target activity, as measured by cytokine levels, when compared to other CAR-EC therapies. The method may reduce the off-target activity as measured by interferon gamma levels. Other off-target activities that may be reduced include toxic lymphophenia, fatal cytolysis of solid tumor targets and chronic hypogammaglobulinemia for hematological targets. Methods of treatment and compositions disclosed herein may be used to treat a cancer comprising CD19-mediated B cell aplasia. The methods and compositions may minimize the CD19-mediated B cell aplasia. The method may avoid long-term B-cell aplasia.

[0501] The CAR-EC platforms, methods and compositions disclosed herein may be used to treat a heterogeneous tumor or a heterogeneous blood cell malignancy in a subject in need thereof. The “pan-B cell” marker CD20 is the most prevalently targeted antigen for B cell neoplasms and the FDA-approved antibody rituximab is a vital component in the treatment of many leukemias and lymphomas. However, resistance mechanisms related to modulation of CD20 antigen expression occurs in a significant number of patients. It is clear that targeting with either CD19 or CD20 antigen alone is insufficient for a curative therapy. The methods disclosed herein provide for construction and administration of two or more switches with different specificities (e.g., an anti-CD19 antibody CAR-EC switch and an anti-CD20 antibody CAR-EC switch). The methods disclosed herein provide for construction and administration of two or more switches with different specificities (e.g., an anti-CD19 antibody CAR-EC switch and an anti-CD22 antibody CAR-EC switch). This methodology may offer a significant advantage against the propensity for relapse in the clinic while avoiding persistent loss of B cells. A heterogeneous tumor or heterogeneous blood cell malignancy may also be treated with an anti-CD19 antibody CAR-EC switch and an anti-CD22 antibody CAR-EC switch. One or more CAR-EC switches may be administered sequentially or simultaneously. A second switch targeting a second cell surface molecule on the target cell may be administered after down regulation of a first cell surface molecule on the target cell that is targeted by a first switch.

[0502] The CAR-EC switch may be administered with one or more additional therapeutic agents. The one or more additional therapeutic agents may be selected from a group consisting of an immunotherapy, a chemotherapy and a steroid. The one or more additional therapeutic agents may be a chemotherapy drug. The chemotherapy drug may be an alkylating agent, an antimetabolite, an anthracycline, a topoisomerase inhibitor, a mitotic inhibitor, a corticosteroid or a differentiating agent. The chemotherapy drug may be selected from actinomycin-D, bleomycin, altretamine, bortezomib, busulfan, carboplatin, capecitabine, carmustine, chlorambucil, cisplatin, cladribine, clofarabine, cyclophosphamide, cytarabine, dacarbazine, daunorubicin, docetaxel, doxorubicin, epirubicin, etoposide, estramustine, floxuridine, fludarabine, fluorouracil, gemcitbine (Gemzar), hydroxyurea, idarubicin, ifosfamide, irinotecan (Camptosar), ixabepilone, L-asparaginase, lomustine, mechlorethamine, melphalan, 6-mercaptopurine, methotrexate, mitomycin-C, paclitaxel (Taxol), pemetrexed, pentostatin, streptozocin, temozolomide, teniposide, thioguanine, thiotepa, topotecan (Hycamtin), vincristine, vinblastine, vinorelbine, retinoids, tretinoin (ATRA or Atralin®), bexarotene (Targretin®) and arsenic trioxide (Arsenox®). The chemotherapy may be administered as a pill to swallow, as an injection into the muscle or fat tissue, intravenously, topically or directly into a body cavity.

[0503] The one or more additional therapeutic agents may comprise an angiogenesis inhibitor. The angiogenesis inhibitor may be selected from bevacizumab, itraconazole, carboxyamidotriazole, TNP-470, CM101, IFN alpha, IL-12, platelet factor 4, suramin, SU5416, thrombospondin, a VEGFR antagonist, an angiostatic steroid with heparin, CAR-ECilage-derived angiogenesis inhibitory factor, matrix metalloprotease inhibitors, angiostatin, endostatin, sorafenib, sunitinib, pazopanib, everolimus, 2-methoxyestradiol, tecogalan, tetrathiomolybdate, thalidomide, prolactin, αvβ3 inhibitor, linomide, tasquinimod, soluble VEGFR-1, soluble NRP-1, angiopoietin 2, vasostatin, calreticulin, TIMP, CDAI, Meth-1, Meth-2, interferon-alpha, interferon-beta, interferon-gamma, CXCL10, IL-4, IL-12, IL-18, prothrombin, antithrombin III fragment, prolactin, VEGI, SPARC, osteopontin, maspin, canstatin, proliferin-related protein and restin.

[0504] The one or more additional therapeutic agents may comprise a hormone therapy. The hormone therapy may be selected from an anti-estrogen (e.g., fulvestrant (Faslodex®), tamoxifen, toremifene (Fareston®)); an aromatase inhibitor (e.g., anastrozole (Arimidex®), exemestane (Aromasin®), letrozole (Femara®)); a progestin (e.g., megestrol acetate (Megace®)); an estrogen; an anti-androgen (e.g., bicalutamide (Casodex®), flutamide (Eulexin®), nilutamide (Nilandron®)); a gonadotropin-releasing hormone (GnRH) or luteinizing hormone-releasing hormone (LHRH) agonist or analog (e.g., leuprolide (Lupron®), goserelin (Zoladex®)).

[0505] The one or more additional therapeutic agents may comprise a steroid. The steroid may be a corticosteroid. The steroid may be cortisol or a derivative thereof. The steroid may be selected from prednisone, methylprednisolone (Solumedrol®) or dexamethasone.

[0506] The CAR-EC switch may be administered with one or more additional therapies. The one or more additional therapies may comprise laser therapy. The one or more additional therapies may comprise radiation therapy. The one or more additional therapies may comprise surgery.

[0507] Disclosed herein are platforms, kits and methods for treating a disease or condition in a subject. The subject may be a healthy subject. The subject may be suffering from a disease or condition. The subject may be suffering from more than one disease or condition. The subject may be suffering from chronic lymphocytic leukemia. The subject may be suffering from acute lymphoblastic leukemia. The subject may be an animal. The subject may be a mammal. The mammal may be a human, a chimpanzee, a gorilla, a monkey, a bovine, a horse, a donkey, a mule, a dog, a cat, a pig, a rabbit, a goat, a sheep, a rat, a hamster, a guinea pig or a mouse. The subject may be a bird or a chicken. The subject may be a human. The subject may be a child. The child may be suffering from acute lymphoblastic leukemia. The subject may be less than 6 months old. The subject may be about 1 year old, about 2 years old, about 3 years old, about 4 years old, about 5 years old, about 6 years old, about 7 years old, about 8 years old, about 9 years old, about 10 years old, about 11 years old, about 12 years old, about 13 years old, about 14 years old, about 15 years old, about 18 years old, about 20 years old, about 25 years old, about 30 years old, about 35 years old, about 40 years old, about 45 years old, about 50 years old, about 55 years old, about 60 years old, about 65 years old, about 70 years old, about 75 years old, about 80 years old, about 85 years old, about 90 years old, about 95 years old, about 100 years old or about 105 years old.

[0508] In some embodiments, the present disclosure provides a method of treating a disease or condition disclosed herein comprising administering (i) a CAR-EC comprising a humanized CAR disclosed herein and (ii) a complementary humanized CAR-EC switch disclosed herein. In some embodiments, the present disclosure provides a method of treating a disease or condition disclosed herein comprising administering (i) a CAR-EC comprising a CAR having a sequence selected from SEQ ID NOS: 63-92, 104, 115, and 181-183 and (ii) a complementary humanized CAR-EC switch disclosed herein. The switch may comprise a light chain sequence selected from SEQ ID NOS: 17-24 and a CAR-ID disclosed herein. The light chain sequence may comprise a humanized sequence selected from SEQ ID NOS: 27-34. The switch may comprise a heavy chain sequence selected from SEQ ID NOS: 2-14. In some embodiments, the present disclosure provides a method of treating a disease or condition disclosed herein comprising administering (i) a CAR-EC comprising a CAR with an extracellular domain that is a scFv having a sequence selected from any one of SEQ ID NOS: 290-388, and 423 and (ii) a complementary humanized CAR-EC switch disclosed herein. The switch may comprise a light chain sequence selected from SEQ ID NOS: 17-24 and a CAR-ID disclosed herein. The light chain sequence may comprise a humanized sequence selected from SEQ ID NOS: 27-34. The switch may comprise a heavy chain sequence selected from SEQ ID NOS: 2-14. The administration may be in any order. For example, in some embodiments, the CAR-EC cells may be administered prior to CAR-EC switch administration. In some embodiments, the CAR-EC switch may be administered prior to CAR-EC cell administration. In some embodiments, the CAR-EC cells may be administered simultaneously with CAR-EC switch administration. In some embodiments, the disease or condition is a disease or condition in which CD19+ cells are implicated in pathology. In some embodiments, the disease or condition is selected from heterogeneous tumors and blood cell malignancies. In some embodiments, the disease or condition is selected from acute lymphoblastic leukemia and chronic lymphocytic leukemia. In some embodiments, the disease or condition is selected from multiple myeloma, acute myloid leukemia, Hodgkins lymphoma, Non-hodgkins lymphoma (NHL), Diffuse large B cell lymphoma (DLBCL), Follicular lymphomas, Mantle cell lymphoma (MCL), Burkitt lymphoma, and Hairy cell leukemia (HCL).

### IX. Methods of Killing or Activating Target Cells

[0509] Further disclosed herein are methods of killing a target cell, comprising contacting a chimeric receptor-effector cell disclosed herein with a chimeric receptor-effector cell switch disclosed herein, wherein the chimeric receptor-effector cell expresses a chimeric receptor with a non-antibody extracellular domain that binds to a CAR-ID on the chimeric receptor effector cell switch, and wherein the chimeric receptor effector cell switch comprises the binding domain that binds the non-antibody extracellular domain of the chimeric receptor and the switch comprises a targeting moiety that binds an antigen on the target cell.

[0510] Further disclosed herein are methods of killing a target cell, comprising contacting a CAR-EC disclosed herein with a CAR-EC switch disclosed herein, wherein the CAR-EC expresses a CAR with an extracellular domain that binds to a CAR-ID on the CAR-EC switch, and wherein the CAR-EC switch comprises a CAR- that binds an extracellular domain of the CAR and the switch comprises a targeting moiety that binds an antigen (e.g., a tumor associated antigen) on the target cell.

[0511] Further disclosed herein are methods of lysing a target cell, comprising contacting a CAR-EC disclosed herein with a CAR-EC switch disclosed herein, wherein the CAR-EC expresses a CAR with an extracellular domain that binds to a CAR-ID on the CAR-EC switch, and wherein the CAR-EC switch comprises a CAR- that binds an extracellular domain of the CAR and the switch comprises a targeting moiety that binds an antigen (e.g., a tumor associated antigen) on the target cell.

[0512] The contacting may occur in vitro. The contacting may occur in vivo in a subject. The subject may be any of the subjects disclosed herein. The subject may have a disease. The disease may be any one or more of the diseases disclosed herein. The disease may be cancer. The contacting may be via administration, via the methods described herein. The administering may comprise administering the CAR-EC switch to a subject that has already been administered chimeric receptor-effector cells expressing a chimeric receptor that binds the switch. The administering may comprise administering to a subject the CAR-EC switch and further administering to the subject a CAR-ECexpressing a chimeric receptor that binds the CAR-EC switch.

[0513] The contacting may induce lysis of the targeted cell. The contacting may kill the target cell. The contacting may kill target cells with an EC₅₀ for killing that ranges from about 1 pM to about 100 pM. The contacting may kill target cells with an EC₅₀ for killing that is lower than 1 pM. The contacting may kill a cell that has a disease. The cell may have any disease disclosed herein. The disease may be cancer.

[0514] The switch may be any switch disclosed herein. The switch may comprise a K4 peptide fused to, grafted to, or attached to a targeting moiety. The switch may comprise an E4 fused to, grafted to, or attached to a targeting moiety. The switch may comprise a GCN4 peptide fused to, grafted to, or attached to a targeting moiety. The GCN4 peptide may comprise a sequence of Structure I: X₁NYHLENEVARLKX2X3 (SEQ ID NO: 269), wherein X₁, X2, and X3 are all any amino acid or absent. The GCN4 peptide may comprise a GCN4 derivative disclosed herein (e.g., any one of SEQ ID NOS: 139-153 and 245). The switch may comprise a Flag tag fused to, grafted to, or attached to a targeting moiety. The switch may comprise a FITC attached to a targeting moiety. The targeting moiety may bind CD19. The targeting moiety may be an anti-CD19 antibody, or an antigen binding portion thereof. The targeting moiety may be a humanized anti-CD19 antibody, or an antigen binding portion thereof. The targeting moiety may bind CD20, CD22, EGFR, EGFRvIII, Her2, CS1, BCMA, CEA, CLL1, CD33, or CD123. The targeting moiety may be an anti-CD20 antibody, an anti-CD22 antibody, an anti-EGFR antibody, an anti-EGFRvIII antibody, an anti-Her2 antibody, an anti-CS1 antibody, an anti-BCMA antibody, an anti-CEA antibody, an anti-CLL1 antibody, an anti-CD123 antibody, or an anti-CD33 antibody. The targeting moiety may be a humanized anti-CD20 antibody, a humanized anti-CD22 antibody, a humanized anti-EGFR antibody, a humanized anti-EGFRvIII antibody, a humanized anti-Her2 antibody, a humanized anti-CS1 antibody, a humanized anti-BCMA antibody, a humanized anti-CEA antibody, a humanized anti-CLL1 antibody, a humanized anti-CD123 antibody, or a humanized anti-CD33 antibody.

[0515] In some embodiments, the present disclosure provides a method of killing a target cell comprising administering (i) a CAR-EC comprising a humanized CAR disclosed herein and (ii) a complementary humanized CAR-EC switch disclosed herein. In some embodiments, the present disclosure provides a method of killing a target cell comprising administering (i) a CAR-EC comprising a CAR having a sequence selected from SEQ ID NOS: 63-92, 104, 115, and 181-183 and (ii) a complementary humanized CAR-EC switch disclosed herein. The switch may comprise a light chain sequence selected from SEQ ID NOS: 17-24 and a CAR-ID disclosed herein. The light chain sequence may comprise a humanized sequence selected from SEQ ID NOS: 27-34. The switch may comprise a heavy chain sequence selected from SEQ ID NOS: 2-14. In some embodiments, the present disclosure provides a method of killing a target cell comprising administering (i) a CAR-EC comprising a CAR selected from the CARs described in Table 11 or Table 12 or a CAR having a humanized extracellular domain that is a scFv having a sequence selected from any one of SEQ ID NOS: 290-388, and 423 and (ii) a complementary humanized CAR-EC switch disclosed herein. The switch may comprise a light chain sequence selected from SEQ ID NOS: 17-24 and a CAR-ID disclosed herein. The light chain sequence may comprise a humanized sequence selected from SEQ ID NOS: 27-34. The switch may comprise a heavy chain sequence selected from SEQ ID NOS: 2-14.

[0516] Further disclosed herein are methods of activating a target cell, comprising contacting a chimeric receptor-effector cell disclosed herein with a chimeric receptor-effector cell switch disclosed herein, wherein the chimeric receptor-effector cell is only activated if the contacting includes both (i) binding of the CAR-ID on the chimeric receptor effector cell switch to the non-antibody extracellular domain of the chimeric receptor expressed on the chimeric receptor-effector cell and (ii) concurrent binding of the targeting moiety on the chimeric receptor effector cell switch to its target antigen.

[0517] Further disclosed are methods of lysing a target cell. In some embodiments, the present disclosure provides a method of lysing a target cell comprising administering (i) a CAR-EC comprising a humanized CAR disclosed herein and (ii) a complementary humanized CAR-EC switch disclosed herein. In some embodiments, the present disclosure provides a method of lysing a target cell comprising administering (i) a CAR-EC comprising a CAR having a sequence selected from SEQ ID NOS: 63-92, 104, 115, and 181-183 and (ii) a complementary humanized CAR-EC switch disclosed herein. The switch may comprise a light chain sequence selected from SEQ ID NOS: 17-24 and a CAR-ID disclosed herein. The light chain sequence may comprise a humanized sequence selected from SEQ ID NOS: 27-34. The switch may comprise a heavy chain sequence selected from SEQ ID NOS: 2-14. In some embodiments, the present disclosure provides a method of lysing a target cell comprising administering (i) a CAR-EC comprising a CAR selected from the CARs described in Table 11 or Table 12 or a CAR having a humanized extracellular domain that is a scFv having a sequence selected from any one of SEQ ID NOS: 290-388, and 423 and (ii) a complementary humanized CAR-EC switch disclosed herein. The switch may comprise a light chain sequence selected from SEQ ID NOS: 17-24 and a CAR-ID disclosed herein. The light chain sequence may comprise a humanized sequence selected from SEQ ID NOS: 27-34. The switch may comprise a heavy chain sequence selected from SEQ ID NOS: 2-14.

[0518] Further disclosed herein are methods of activating a CAR-EC (e.g., a CAR-EC disclosed herein), comprising contacting the CAR-EC (e.g., the CAR-EC disclosed herein) with a complementary CAR-EC switch disclosed herein, wherein the CAR-EC is activated only if the contacting includes both (i) binding of the CAR-ID on the CAR-EC switch to the extracellular domain of the chimeric receptor (e.g., CAR) expressed on the CAR-EC and (ii) concurrent binding of the targeting moiety on the CAR-EC switch to its target antigen. In some embodiments, the present disclosure provides a method of activating a CAR-EC comprising administering (i) a CAR-EC comprising a humanized CAR disclosed herein and (ii) a complementary humanized CAR-EC switch disclosed herein. In some embodiments, the present disclosure provides a method of activating a CAR-EC comprising administering (i) a CAR-EC comprising a CAR having a sequence selected from SEQ ID NOS: 63-92, 104, 115, and 181-183 and (ii) a complementary humanized CAR-EC switch disclosed herein. The switch may comprise a light chain sequence selected from SEQ ID NOS: 17-24 and a CAR-ID disclosed herein. The light chain sequence may comprise a humanized sequence selected from SEQ ID NOS: 27-34. The switch may comprise a heavy chain sequence selected from SEQ ID NOS: 2-14. In some embodiments, the present disclosure provides a method of killing a target cell comprising administering (i) a CAR-EC comprising a CAR selected from the CARs described in Table 11 or Table 12 or a CAR having a humanized extracellular domain that is a scFv having a sequence selected from any one of SEQ ID NOS: 290-388, and 423 and (ii) a complementary humanized CAR-EC switch disclosed herein. The switch may comprise a light chain sequence selected from SEQ ID NOS: 17-24 and a CAR-ID disclosed herein. The light chain sequence may comprise a humanized sequence selected from SEQ ID NOS: 27-34. The switch may comprise a heavy chain sequence selected from SEQ ID NOS: 2-14.

[0519] The contacting may occur in vitro. The contacting may occur in vivo in a subject. The subject may be any of the subjects disclosed herein. The subject may be a human. The subject may have a disease. The disease may be any one or more of the diseases disclosed herein. The disease may be cancer. The contacting may be via administration (or “administering”). The administration may be via any one or more of the methods described herein. The administering may comprise administering the CAR-EC switch to a subject that has already been administered a CAR-EC expressing a chimeric receptor that binds the switch (i.e., a CAR-EC expressing a complementary CAR). The administering may comprise administering to a subject the CAR-EC switch and further administering to the subject a CAR-EC expressing a CAR that binds the CAR-EC switch.

[0520] The contacting may induce lysis of the targeted cell. The contacting may kill the target cell. The contacting may kill target cells with an EC₅₀ for killing that ranges from about 1 pM to about 100 pM. The contacting may kill target cells with an EC₅₀ for killing that is lower than 1 pM. The contacting may kill a cell that has a disease. The cell may have any disease disclosed herein. The disease may be cancer.

[0521] The switch may be any switch disclosed herein. The switch may comprise a K4 peptide fused to, grafted to, or attached to a targeting moiety. The switch may comprise an E4 fused to, grafted to, or attached to a targeting moiety. The switch may comprise a GCN4 peptide fused to, grafted to, or attached to a targeting moiety. The GCN4 peptide may comprise a sequence of Structure I: X₁NYHLENEVARLKX2X3 (SEQ ID NO: 269), wherein X₁, X2, and X3 are all any amino acid or absent. The GCN4 peptide may comprise a GCN4 derivative disclosed herein (e.g., any one of SEQ ID NOS: 139-153 and 245). The switch may comprise a Flag tag fused to, grafted to, or attached to a targeting moiety. The switch may comprise a FITC attached to a targeting moiety. The targeting moiety may bind CD19. The targeting moiety may be a humanized anti-CD19 antibody, or an antigen binding portion thereof.

[0522] The CAR-EC switch may comprise a targeting moiety that is an FMC63 antibody, or a CD19-binding portion thereof, which comprises (i) a light chain sequence selected from the group consisting of SEQ ID NOS: 16-25 and (ii) a heavy chain sequence selected from the group consisting of SEQ ID NOS: 1-15. The CAR-EC switch may comprise a a GCN4 peptide fused to a targeting moiety that is an FMC63 antibody, or a CD19-binding portion thereof, which comprises (i) a light chain sequence selected from the group consisting of SEQ ID NOS: 16-25 and (ii) a heavy chain sequence selected from the group consisting of SEQ ID NOS: 1-15, wherein the GCN4 peptide comprises a sequence of Structure I: X1 NYHLENEVARLKX2X3 (SEQ ID NO: 269), wherein X1, X2, and X3 are all any amino acid or absent. The GCN4 peptide may comprise a GCN4 derivative disclosed herein. The GCN4 peptide may be selected from any one of SEQ ID NOS: 139-153 and 245).

### X. CAR-EC Platform

[0523] Disclosed herein are humanized chimeric antigen receptor effector cell (CAR-EC) platforms comprising (i) an effector cell, wherein the effector cell comprises a polynucleotide encoding a chimeric antigen receptor (CAR); and (ii) a chimeric antigen receptor effector cell (CAR-EC) switch, wherein the CAR-EC switch comprises a CAR-ID and a targeting moiety and wherein the CAR-EC switch binds a cell surface molecule on a target cell, and wherein one or both of the CAR and the CAR-EC switch are humanized. Also disclosed herein are humanized CAR-EC platforms comprising (i) an effector cell, wherein the effector cell expresses a CAR; and (ii) a CAR-EC switch, wherein the CAR-EC switch comprises a CAR-ID and a targeting moiety and wherein the targeting moiety of the CAR-EC switch binds a cell surface molecule on a target cell, and wherein one or both of the CAR and the CAR-EC switch are humanized. The CAR-EC switch may be selected from any CAR-EC switches disclosed herein (e.g., a humanized CAR-EC switch disclosed here). As used herein, the terms “switchable CAR platform”, “CAR-EC platform”, “sCAR-T platform”, “sCAR-T cell platform”, “switchable chimeric antigen receptor platform”, “chimeric antigen receptor-effector cell platform”, “CAR-T switch platform”, “sCAR platform”, “switch platform”, and “switchable platform” are used interchangeably.

[0524] The CAR-EC platform may comprise a first CAR-EC switch. The CAR-EC platform a first CAR-EC switch and at least one second CAR-EC switch. In some embodiments, the CAR-EC platform comprises at least two humanized CAR-EC switches. The CAR-EC platforms may comprise 3, 4, 5, 6, 7, 8, 9, 10, 11, 12, 13, 14, 15, 16, 17, 18, 19, 20 or more humanized CAR-EC switches. The CAR-EC platforms may comprise may comprise more than 20, more than 25, more than 30, more than 35, more than 40, more than 45 or more than 50 humanized CAR-EC switches. The two or more switches may be selected from one or more humanized CAR-EC switches disclosed herein or a combination thereof.

[0525] The CAR-EC platforms disclosed herein may further comprise a first CAR-EC switch and a second CAR-EC switch, wherein the first CAR-EC switch comprises a first CAR-ID and a first targeting moiety and the second CAR-EC switch comprises a second CAR-ID and a second targeting moiety. The first CAR-ID and the second CAR-ID may be the same. The first CAR-ID and the second CAR-ID may be different. The first CAR-ID and the second CAR-ID may be about 99%, about 98%, about 97%, about 96%, about 95%, about 92%, about 90%, about 85%, about 80%, about 75%, about 70%, about 65%, about 60%, about 55%, about 50%, about 45%, about 40%, about 35%, about 30%, about 25%, about 20%, about 15%, about 10%, about 5% or about 2% identical. The first targeting moiety and the second targeting moiety may be the same. The first targeting moiety and the second targeting moiety may be different. The first targeting moiety and the second targeting moiety may be about 99%, about 98%, about 97%, about 96%, about 95%, about 92%, about 90%, about 85%, about 80%, about 75%, about 70%, about 65%, about 60%, about 55%, about 50%, about 45%, about 40%, about 35%, about 30%, about 25%, about 20%, about 15%, about 10%, about 5% or about 2% identical.

[0526] The CAR-EC switch may have any switch sequence disclosed herein. For example, it may comprise a light chain and a heavy chain, wherein the light chain comprises or consists of any switch light chain sequence disclosed herein and the heavy chain comprises or consists of any switch heavy chain sequence disclosed herein. Such heavy and/or light chain sequences may be humanized. In some embodiments, the CAR-EC switch is humanized and comprises a light chain sequence selected from SEQ ID NOS: 17-24 and a heavy chain sequence selected from SEQ ID NOS: 2-14, wherein one or both of the heavy and light chains comprise a CAR-ID disclosed herein (e.g., a GCN4 CAR-ID). In particular embodiments, the light chain sequence comprises a humanized sequence selected from SEQ ID NOS: 27-34 (which comprise an N-terminal GCN4 CAR-ID) and a heavy chain sequence selected from SEQ ID NOS: 2-14. In particular embodiments, the switch is a switch described in Table 6 or Table 8, which presents heavy chain/light chain combinations comprised in several of the switches disclosed herein. In some embodiments, the switch is identical to a switch described in Table 6 or Table 8, except that the CAR-ID comprised in the switch is modified to have a sequence of Structure I. In some embodiments, the sequence of Structure I is selected from any one of SEQ ID NOS: 26, 36, 139-163, and 245.

[0527] The CAR-EC platforms disclosed herein may further comprise a first CAR-EC. The first CAR-EC may comprise a first CAR. The first CAR may be humanized. The first CAR may be a CAR disclosed herein. The first CAR may have any CAR sequence disclosed herein. The first CAR may be humanized to reduce immunogenicity to humans. The first CAR may comprise an extracellular domain that is humanized. The humanization may reduce immunogenicity of the CAR to humans while retaining the specificity and affinity of the extracellular domain for the CAR-EC switch. The first CAR may be a humanized version of any one of the CAR sequences provided in Table 13 or it may be a humanized version of any one of SEQ ID NOS: 270-289. The first CAR may be a humanized CAR comprising an extracellular domain that comprises an antibody or antibody fragment that binds to a CAR-ID of a CAR-EC switch. The antibody or antibody fragment may be humanized. The antibody fragment may be a scFv (e.g., a humanized scFv). The scFv or humanized scFv may comprise or consist of the general structure light chain-linker-heavy chain. The scFv or humanized scFv may comprise or consist of the general structure heavy chain-linker-light chain. The humanized scFv may comprise a humanized VH (variable heavy chain) sequence with non-human (e.g., murine) CDRs transplanted onto a human immunoglobulin framework. The humanized scFv may comprise a humanized VL (variable light chain) sequence with non-human (e.g., murine) CDRs transplanted onto a human immunoglobulin framework. In some particular embodiments, the first CAR comprises a structure selected from constructs A-H in FIG. 24A. In certain embodiments, the first CAR comprises a structure according to construct A, construct B, or construct C in FIG. 24. In certain embodiments, the first CAR is selected from the CARs described in Table 11. In certain particular embodiments, the first CAR is selected from the CARs described in Table 12. In certain embodiments, the extracellular domain of the first CAR comprises a humanized scFv sequence selected from any one of SEQ ID NOS: 290-388, and 423.

[0528] In certain embodiments, the CAR-EC platform comprises
[0529] a. a first CAR-EC switch:
   [0530] i. that comprises a humanized light chain sequence selected from SEQ ID NOS: 27-34 (which comprise an N-terminal GCN4 CAR-ID) and a heavy chain sequence selected from SEQ ID NOS: 2-14;
   [0531] ii. as described in Table 6 or Table 8, which presents heavy chain/light chain combinations comprised in several of the switches disclosed herein; or
   [0532] iii. that is identical to a switch described in Table 6 or Table 8, except that the CAR-ID comprised in the switch is modified to have a sequence selected from any one of SEQ ID NOS: 26, 36, 139, and 154-163; and
[0533] b. and a first CAR-EC expressing a complementary first CAR; wherein the CAR
   [0534] i. comprises a structure selected from constructs A-H in FIG. 24A;
   [0535] ii. comprises a structure according to construct E in FIG. 24A;
   [0536] iii. is selected from the CARs described in Table 11;
   [0537] iv. is selected from the CARs described in Table 12; or
   [0538] v. extracellular domain comprises a humanized scFv sequence selected from any one of SEQ ID NOS: 290-388, and 423;
[0539] and optionally
[0540] c. one or more second CAR-EC switch, at least one of which comprises a different targeting moiety that binds a different target than the targeting moiety on the first CAR-EC switch; and wherein the CAR-ID on each second CAR-EC switch is optionally the same or different than the CAR-ID on the first CAR-EC switch;
wherein in some embodiments, when CAR-ID on the first switch is different than the CAR-ID on the second switch, and the first CAR cannot bind to the second CAR-ID, the platform may also comprise a second CAR-EC that binds the CAR-ID on the second switch.

TABLE 3
SEQUENCES
Sequence Table

| | Seq id | | |
|---|---|---|---|
| Sequence | no | Name | ID |
| QVQLQESGPGLVKPSETLSLTCTVSGGSISSYYWSWIRQPP | 1 | h4-59_01 | Amino |
| GKGLEWIGYIYYSGSTNYNPSLKSRVTISVDTSKNQFSLKL | | | acid |
| SSVTAADTAVYYCAR | | | |
| QVQLQESGPGLVKPSETLSLTCTVSGVSLPDYGVSWIRQPP | 2 | hFMCH1 | Amino |
| GKGLEWIGVIWGSETTYYNPSLKSRVTISVDTSKNQFSLKL | | | acid |
| SSVTAADTAVYYCARHYYYGGSYAMDYWGQGTLVTVSS | | | |
| QVQLQESGPGLVKPSETLSVTCTVSGVSLPDYGVSWIRQPP | 3 | hFMCH2 | Amino |
| GKGLEWLGVIWGSETTYYNPSLKSRLTISKDTSKNQVSLKM | | | acid |
| SSLTAADTAVYYCARHYYYGGSYAMDYWGQGTLVTVSS | | | |
| QVQLQESGPGLVKPSETLSVTCTVSGVSLPDYGVSWIRQPP | 4 | hFMCH3 | Amino |
| GKGLEWLGVIWGSETTYYNPSLKSRLTISKDNSKNQVSLKM | | | acid |
| SSLTAADTAVYYCARHYYYGGSYAMDYWGQGTLVTVSS | | | |
| QVQLQESGPGLVKPSETLSVTCTVSGVSLPDYGVSWIRQPP | 5 | hFMCH4a | Amino |
| GKGLEWLGVIWGSETTYYNPSLKSRLTISKDTSKNQVSLKM | | | acid |
| SSLTAADTAVYYCAKHYYYGGSYAMDYWGQGTLVTVSS | | | |
| QVQLQESGPGLVKPSETLSVTCTVSGVSLPDYGVSWIRQPP | 6 | hFMCH4b | Amino |
| GKGLEWLGVIWGSETTYYNPSLKSRLTISKDNSKNQVSLKM | | | acid |
| SSLTAADTAVYYCAKHYYYGGSYAMDYWGQGTLVTVSS | | | |
| QVQLQESGPGLVKPSETLSVTCTVSGVSLPDYGVSWIRQPP | 7 | hFMCH4c | Amino |
| GKGLEWLGVIWGSETTYYNSALKSRLTISKDNSKNQVSLKM | | | acid |
| SSLTAADTAVYYCAKHYYYGGSYAMDYWGQGTLVTVSS | | | |
| QVQLQESGPGLVKPSETLSVTCTVSGVSLPDYGVSWIRQPP | 8 | hFMCH4z | Amino |
| GKGLEWLGVIWGSETTYYNSSLKSRLTISKDNSKNQVSLKM | | | acid |
| SSLTAADTAVYYCAKHYYYGGSYAMDYWGQGTLVTVSS | | | |
| QVQLQESGPGLVKPSETLSLTCTVSGVSLPDYGVSWIRQPP | 9 | hFMCH4b-x | Amino |
| GKGLEWIGVIWGSETTYYNPSLKSRVTISKDNSKNQFSLKL | | | acid |
| SSVTAADTAVYYCAKHYYYGGSYAMDYWGQGTLVTVSS | | | |
| QVQLQESGPGLVKPSETLSLTCTVSGVSLPDYGVSWIRQPP | 10 | hFMCH4c-x | Amino |
| GKGLEWIGVIWGSETTYYNSALKSRVTISKDNSKNQFSLKL | | | acid |
| SSVTAADTAVYYCAKHYYYGGSYAMDYWGQGTLVTVSS | | | |
| EVQLQESGPGLVKPSETLSLTCTVSGVSLPDYGVSWIRQPP | 11 | hFMCH4c- | Amino |
| GKGLEWLGVIWGSETTYYNSALKSRLTISKDNSKNQVSLKM | | 20L-E | acid |
| SSLTAADTAVYYCAKHYYYGGSYAMDYWGQGTLVTVSS | | | |
| EVQLQESGPGLVKPSETLSVTCTVSGVSLPDYGVSWIRQPP | 12 | hFMCH4b-E | Amino |
| GKGLEWLGVIWGSETTYYNPSLKSRLTISKDNSKNQVSLKM | | | acid |
| SSLTAADTAVYYCAKHYYYGGSYAMDYWGQGTLVTVSS | | | |
| EVQLQESGPGLVKPSETLSVTCTVSGVSLPDYGVSWIRQPP | 13 | hFMCH4c-E | Amino |
| GKGLEWLGVIWGSETTYYNSALKSRLTISKDNSKNQVSLKM | | | acid |
| SSLTAADTAVYYCAKHYYYGGSYAMDYWGQGTLVTVSS | | | |
| EVQLQESGPGLVKPSETLSLTCTVSGVSLPDYGVSWIRQPP | 14 | hFMCH4b- | Amino |
| GKGLEWLGVIWGSETTYYNPSLKSRLTISKDNSKNQVSLKM | | 20L-E | acid |
| SSLTAADTAVYYCAKHYYYGGSYAMDYWGQGTLVTVSS | | | |
| EVKLQESGPGLVAPSQSLSVTCTVSGVSLPDYGVSWIRQPP | 15 | mFMC63H | Amino |
| RKGLEWLGVIWGSETTYYNSALKSRLTIIKDNSKSQVFLKM | | | acid |
| NSLQTDDTAIYYCAKHYYYGGSYAMDYWGQGTSVTVSS | | | |
| DIQMTQSPSSLSASVGDRVTITCRASQSISSYLNWYQQKPG | 16 | IGKV1-39 | Amino |
| KAPKLLIYAASSLQSGVPSRFSGSGSGTDFTLTISSLQPED | | | acid |
| FATYYCQQSYSTPP | | | |
| DIQMTQSPSSLSASVGDRVTITCRASQDISKYLNWYQQKPG | 17 | hFMCL1 | Amino |
| KAPKLLIYHTSRLHSGVPSRFSGSGSGTDFTLTISSLQPED | | | acid |
| FATYYCQQGNTLPYTFGQGTKLEIK | | | |
| DIQMTQSPSSLSASVGDRVTITCRASQDISKYLNWYQQKPG | 18 | hFMCL2 | Amino |
| KAPKLLIYHTSRLHSGVPSRFSGSGSGTDYTLTISSLQPED | | | acid |
| FATYYCQQGATLPYTFGQGTKLEIK | | | |
| DIQMTQSPSSLSASVGDRVTITCRASQDISKYLNWYQQKPG | 19 | hFMCL2a | Amino |
| KAVKLLIYHTSRLHSGVPSRFSGSGSGTDYTLTISSLQPED | | | acid |
| FATYYCQQGATLPYTFGQGTKLEIK | | | |
| DIQMTQSPSSLSASVGDRVTITCRASQDISKYLNWYQQKPG | 20 | hFMCL2b | Amino |
| KAVKLLIYHTSRLHSGVPSRFSGSGSGTDYTLTISSLQPED | | | acid |
| FATYFCQQGATLPYTFGQGTKLEIK | | | |
| DIQMTQSPSSLSASVGDRVTITCRASQDISKYLNWYQQKPG | 21 | hFMCL2b-1 | Amino |
| KAPKLLIYHTSRLHSGVPSRFSGSGSGTDYTLTISSLQPED | | | acid |
| FATYFCQQGATLPYTFGQGTKLEIK | | | |
| DIQMTQSPSSLSASVGDRVTITCRASQDISKYLNWYQQKPG | 22 | hFMCL2b(V44L) | Amino |
| KALKLLIYHTSRLHSGVPSRFSGSGSGTDYTLTISSLQPED | | | acid |
| FATYFCQQGATLPYTFGQGTKLEIK | | | |
| DIQMTQSPSSLSASVGDRVTITCRASQDISKYLNWYQQKPG | 23 | hFMCL2b(A92N) | Amino |
| KAVKLLIYHTSRLHSGVPSRFSGSGSGTDYTLTISSLQPED | | | acid |
| FATYFCQQGNTLPYTFGQGTKLEIK | | | |
| DIQMTQSPSSLSASVGDRVTITCRASQDISKYLNWYQQKPG | 24 | hFMCL2c | Amino |
| KAIKLLIYHTSRLHSGVPSRFSGSGSGTDYTLTISSLQPED | | | acid |
| FATYFCQQGATLPYTFGQGTKLEIK | | | |
| DIQMTQTTSSLSASLGDRVTISCRASQDISKYLNWYQQKPD | 25 | mFMC63L | Amino |
| GTVKLLIYHTSRLHSGVPSRFSGSGSGTDYSLTISNLEQED | | | acid |
| IATYFCQQGNTLPYTFGGGTKLEIK | | | |
| NYHLENEVARLKKL | 26 | yeast | Amino |
| | | transcription | acid |
| | | factor | |
| | | GCN4 | |
| | | truncated | |
| | | binding | |
| | | peptide | |
| NYHLENEVARLKKLGGGGSDIQMTQSPSSLSASVGDRVTIT | 27 | hFMCL1- | Amino |
| CRASQDISKYLNWYQQKPGKAPKLLIYHTSRLHSGVPSRFS | | LCNT | acid |
| GSGSGTDFTLTISSLQPEDFATYYCQQGNTLPYTFGQGTKL | | | |
| EIK | | | |
| NYHLENEVARLKKLGGGGSDIQMTQSPSSLSASVGDRVTIT | 28 | hFMCL2- | Amino |
| CRASQDISKYLNWYQQKPGKAPKLLIYHTSRLHSGVPSRFS | | LCNT | acid |
| GSGSGTDYTLTISSLQPEDFATYYCQQGATLPYTFGQGTKL | | | |
| EIK | | | |
| NYHLENEVARLKKLGGGGSDIQMTQSPSSLSASVGDRVTIT | 29 | hFMCL2a- | Amino |
| CRASQDISKYLNWYQQKPGKAVKLLIYHTSRLHSGVPSRFS | | LCNT | acid |
| GSGSGTDYTLTISSLQPEDFATYYCQQGATLPYTFGQGTKL | | | |
| EIK | | | |
| NYHLENEVARLKKLGGGGSDIQMTQSPSSLSASVGDRVTIT | 30 | hFMCL2b- | Amino |
| CRASQDISKYLNWYQQKPGKAVKLLIYHTSRLHSGVPSRFS | | LCNT | acid |
| GSGSGTDYTLTISSLQPEDFATYFCQQGATLPYTFGQGTKL | | | |
| EIK | | | |
| NYHLENEVARLKKLGGGGSDIQMTQSPSSLSASVGDRVTIT | 31 | hFMCL2b-1- | Amino |
| CRASQDISKYLNWYQQKPGKAPKLLIYHTSRLHSGVPSRFS | | LCNT | acid |
| GSGSGTDYTLTISSLQPEDFATYFCQQGATLPYTFGQGTKL | | | |
| EIK | | | |
| NYHLENEVARLKKLGGGGSDIQMTQSPSSLSASVGDRVTIT | 32 | hFMCL2b(V44L)- | Amino |
| CRASQDISKYLNWYQQKPGKALKLLIYHTSRLHSGVPSRFS | | LCNT | acid |
| GSGSGTDYTLTISSLQPEDFATYFCQQGATLPYTFGQGTKL | | | |
| EIK | | | |
| NYHLENEVARLKKLGGGGSDIQMTQSPSSLSASVGDRVTIT | 33 | hFMCL2b(A92N)- | Amino |
| CRASQDISKYLNWYQQKPGKAVKLLIYHTSRLHSGVPSRFS | | LCNT | acid |
| GSGSGTDYTLTISSLQPEDFATYFCQQGNTLPYTFGQGTKL | | | |
| EIK | | | |
| NYHLENEVARLKKLGGGGSDIQMTQSPSSLSASVGDRVTIT | 34 | hFMCL2c- | Amino |
| CRASQDISKYLNWYQQKPGKAVKLLIYHTSRLHSGVPSRFS | | LCNT | acid |
| GSGSGTDYTLTISSLQPEDFATYFCQQGATLPYTFGQGTKL | | | |
| EIK | | | |
| NYHLENEVARLKKLGGGGSDIQMTQTTSSLSASLGDRVTIS | 35 | mFMC63- | Amino |
| CRASQDISKYLNWYQQKPDGTVKLLIYHTSRLHSGVPSRFS | | LCNT | acid |
| GSGSGTDYSLTISNLEQEDIATYFCQQGNTLPYTFGGGTKL | | | |
| EIK | | | |
| RMKQLEPKVEELLPKNYHLENEVARLKKLVGER | 36 | yeast | Amino |
| | | transcription | acid |
| | | factor | |
| | | GCN4 | |
| | | (7P14P) | |
| GGGGSNYHLENEVARLKKLGGGGS | 37 | yeast | Amino |
| | | transcription | acid |
| | | factor | |
| | | GCN4 | |
| | | truncated | |
| | | binding | |
| | | peptide | |
| | | with | |
| | | linkers | |
| GGGGSDYKDDDDK | 38 | Hydrophilic | Amino |
| | | target | acid |
| | | peptide | |
| | | (HTP) | |
| GGGGSDYKDDDDKP | 39 | Hydrophilic | Amino |
| | | target | acid |
| | | peptide | |
| | | (HTP) P | |
| DYKDDDDK | 40 | FLAG ® | Amino |
| | | | acid |
| CAGGTGGCACTTTTCGGGGAAATGTGCGCGGAACCCCTATT | 63 | LV-EF1a- | DNA |
| TGTTTATTTTTCTAAATACATTCAAATATGTATCCGCTCAT | | GCN4(52SR4)- | |
| GAGACAATAACCCTGATAAATGCTTCAATAATATTGAAAAA | | BBZ | |
| GGAAGAGTATGAGTATTCAACATTTCCGTGTCGCCCTTATT | | | |
| CCCTTTTTTGCGGCATTTTGCCTTCCTGTTTTTGCTCACCC | | | |
| AGAAACGCTGGTGAAAGTAAAAGATGCTGAAGATCAGTTGG | | | |
| GTGCACGAGTGGGTTACATCGAACTGGATCTCAACAGCGGT | | | |
| AAGATCCTTGAGAGTTTTCGCCCCGAAGAACGTTTTCCAAT | | | |
| GATGAGCACTTTTAAAGTTCTGCTATGTGGCGCGGTATTAT | | | |
| CCCGTATTGACGCCGGGCAAGAGCAACTCGGTCGCCGCATA | | | |
| CACTATTCTCAGAATGACTTGGTTGAGTACTCACCAGTCAC | | | |
| AGAAAAGCATCTTACGGATGGCATGACAGTAAGAGAATTAT | | | |
| GCAGTGCTGCCATAACCATGAGTGATAACACTGCGGCCAAC | | | |
| TTACTTCTGACAACGATCGGAGGACCGAAGGAGCTAACCGC | | | |
| TTTTTTGCACAACATGGGGGATCATGTAACTCGCCTTGATC | | | |
| GTTGGGAACCGGAGCTGAATGAAGCCATACCAAACGACGAG | | | |
| CGTGACACCACGATGCCTGTAGCAATGGCAACAACGTTGCG | | | |
| CAAACTATTAACTGGCGAACTACTTACTCTAGCTTCCCGGC | | | |
| AACAATTAATAGACTGGATGGAGGCGGATAAAGTTGCAGGA | | | |
| CCACTTCTGCGCTCGGCCCTTCCGGCTGGCTGGTTTATTGC | | | |
| TGATAAATCTGGAGCCGGTGAGCGTGGGTCTCGCGGTATCA | | | |
| TTGCAGCACTGGGGCCAGATGGTAAGCCCTCCCGTATCGTA | | | |
| GTTATCTACACGACGGGGAGTCAGGCAACTATGGATGAACG | | | |
| AAATAGACAGATCGCTGAGATAGGTGCCTCACTGATTAAGC | | | |
| ATTGGTAACTGTCAGACCAAGTTTACTCATATATACTTTAG | | | |
| ATTGATTTAAAACTTCATTTTTAATTTAAAAGGATCTAGGT | | | |
| GAAGATCCTTTTTGATAATCTCATGACCAAAATCCCTTAAC | | | |
| GTGAGTTTTCGTTCCACTGAGCGTCAGACCCCGTAGAAAAG | | | |
| ATCAAAGGATCTTCTTGAGATCCTTTTTTTCTGCGCGTAAT | | | |
| CTGCTGCTTGCAAACAAAAAAACCACCGCTACCAGCGGTGG | | | |
| TTTGTTTGCCGGATCAAGAGCTACCAACTCTTTTTCCGAAG | | | |
| GTAACTGGCTTCAGCAGAGCGCAGATACCAAATACTGTCCT | | | |
| TCTAGTGTAGCCGTAGTTAGGCCACCACTTCAAGAACTCTG | | | |
| TAGCACCGCCTACATACCTCGCTCTGCTAATCCTGTTACCA | | | |
| GTGGCTGCTGCCAGTGGCGATAAGTCGTGTCTTACCGGGTT | | | |
| GGACTCAAGACGATAGTTACCGGATAAGGCGCAGCGGTCGG | | | |
| GCTGAACGGGGGGTTCGTGCACACAGCCCAGCTTGGAGCGA | | | |
| ACGACCTACACCGAACTGAGATACCTACAGCGTGAGCTATG | | | |
| AGAAAGCGCCACGCTTCCCGAAGGGAGAAAGGCGGACAGGT | | | |
| ATCCGGTAAGCGGCAGGGTCGGAACAGGAGAGCGCACGAGG | | | |
| GAGCTTCCAGGGGGAAACGCCTGGTATCTTTATAGTCCTGT | | | |
| CGGGTTTCGCCACCTCTGACTTGAGCGTCGATTTTTGTGAT | | | |
| GCTCGTCAGGGGGGCGGAGCCTATGGAAAAACGCCAGCAAC | | | |
| GCGGCCTTTTTACGGTTCCTGGCCTTTTGCTGGCCTTTTGC | | | |
| TCACATGTTCTTTCCTGCGTTATCCCCTGATTCTGTGGATA | | | |
| ACCGTATTACCGCCTTTGAGTGAGCTGATACCGCTCGCCGC | | | |
| AGCCGAACGACCGAGCGCAGCGAGTCAGTGAGCGAGGAAGC | | | |
| GGAAGAGCGCCCAATACGCAAACCGCCTCTCCCCGCGCGTT | | | |
| GGCCGATTCATTAATGCAGCTGGCACGACAGGTTTCCCGAC | | | |
| TGGAAAGCGGGCAGTGAGCGCAACGCAATTAATGTGAGTTA | | | |
| GCTCACTCATTAGGCACCCCAGGCTTTACACTTTATGCTTC | | | |
| CGGCTCGTATGTTGTGTGGAATTGTGAGCGGATAACAATTT | | | |
| CACACAGGAAACAGCTATGACCATGATTACGCCAAGCGCGC | | | |
| AATTAACCCTCACTAAAGGGAACAAAAGCTGGAGCTGCAAG | | | |
| CTTAATGTAGTCTTATGCAATACTCTTGTAGTCTTGCAACA | | | |
| TGGTAACGATGAGTTAGCAACATGCCTTACAAGGAGAGAAA | | | |
| AAGCACCGTGCATGCCGATTGGTGGAAGTAAGGTGGTACGA | | | |
| TCGTGCCTTATTAGGAAGGCAACAGACGGGTCTGACATGGA | | | |
| TTGGACGAACCACTGAATTGCCGCATTGCAGAGATATTGTA | | | |
| TTTAAGTGCCTAGCTCGATACAATAAACGGGTCTCTCTGGT | | | |
| TAGACCAGATCTGAGCCTGGGAGCTCTCTGGCTAACTAGGG | | | |
| AACCCACTGCTTAAGCCTCAATAAAGCTTGCCTTGAGTGCT | | | |
| TCAAGTAGTGTGTGCCCGTCTGTTGTGTGACTCTGGTAACT | | | |
| AGAGATCCCTCAGACCCTTTTAGTCAGTGTGGAAAATCTCT | | | |
| AGCAGTGGCGCCCGAACAGGGACCTGAAAGCGAAAGGGAAA | | | |
| CCAGAGCTCTCTCGACGCAGGACTCGGCTTGCTGAAGCGCG | | | |
| CACGGCAAGAGGCGAGGGGCGGCGACTGGTGAGTACGCCAA | | | |
| AAATTTTGACTAGCGGAGGCTAGAAGGAGAGAGATGGGTGC | | | |
| GAGAGCGTCAGTATTAAGCGGGGGAGAATTAGATCGCGATG | | | |
| GGAAAAAATTCGGTTAAGGCCAGGGGGAAAGAAAAAATATA | | | |
| AATTAAAACATATAGTATGGGCAAGCAGGGAGCTAGAACGA | | | |
| TTCGCAGTTAATCCTGGCCTGTTAGAAACATCAGAAGGCTG | | | |
| TAGACAAATACTGGGACAGCTACAACCATCCCTTCAGACAG | | | |
| GATCAGAAGAACTTAGATCATTATATAATACAGTAGCAACC | | | |
| CTCTATTGTGTGCATCAAAGGATAGAGATAAAAGACACCAA | | | |
| GGAAGCTTTAGACAAGATAGAGGAAGAGCAAAACAAAAGTA | | | |
| AGACCACCGCACAGCAAGCGGCCGCTGATCTTCAGACCTGG | | | |
| AGGAGGAGATATGAGGGACAATTGGAGAAGTGAATTATATA | | | |
| AATATAAAGTAGTAAAAATTGAACCATTAGGAGTAGCACCC | | | |
| ACCAAGGCAAAGAGAAGAGTGGTGCAGAGAGAAAAAAGAGC | | | |
| AGTGGGAATAGGAGCTTTGTTCCTTGGGTTCTTGGGAGCAG | | | |
| CAGGAAGCACTATGGGCGCAGCCTCAATGACGCTGACGGTA | | | |
| CAGGCCAGACAATTATTGTCTGGTATAGTGCAGCAGCAGAA | | | |
| CAATTTGCTGAGGGCTATTGAGGCGCAACAGCATCTGTTGC | | | |
| AACTCACAGTCTGGGGCATCAAGCAGCTCCAGGCAAGAATC | | | |
| CTGGCTGTGGAAAGATACCTAAAGGATCAACAGCTCCTGGG | | | |
| GATTTGGGGTTGCTCTGGAAAACTCATTTGCACCACTGCTG | | | |
| TGCCTTGGAATGCTAGTTGGAGTAATAAATCTCTGGAACAG | | | |
| ATTGGAATCACACGACCTGGATGGAGTGGGACAGAGAAATT | | | |
| AACAATTACACAAGCTTAATACACTCCTTAATTGAAGAATC | | | |
| GCAAAACCAGCAAGAAAAGAATGAACAAGAATTATTGGAAT | | | |
| TAGATAAATGGGCAAGTTTGTGGAATTGGTTTAACATAACA | | | |
| AATTGGCTGTGGTATATAAAATTATTCATAATGATAGTAGG | | | |
| AGGCTTGGTAGGTTTAAGAATAGTTTTTGCTGTACTTTCTA | | | |
| TAGTGAATAGAGTTAGGCAGGGATATTCACCATTATCGTTT | | | |
| CAGACCCACCTCCCAACCCCGAGGGGACCCGACAGGCCCGA | | | |
| AGGAATAGAAGAAGAAGGTGGAGAGAGAGACAGAGACAGAT | | | |
| CCATTCGATTAGTGAACGGATCTCGACGGTTAACTTTTAAA | | | |
| AGAAAAGGGGGGATTGGGGGGTACAGTGCAGGGGAAAGAAT | | | |
| AGTAGACATAATAGCAACAGACATACAAACTAAAGAATTAC | | | |
| AAAAACAAATTACAAAAATTCAAAATTTTATCGAGCTTTGC | | | |
| AAAGATGGATAAAGTTTTAAACAGAGAGGAATCTTTGCAGC | | | |
| TAATGGACCTTCTAGGTCTTGAAAGGAGTGCCTCGTGAGGC | | | |
| TCCGGTGCCCGTCAGTGGGCAGAGCGCACATCGCCCACAGT | | | |
| CCCCGAGAAGTTGGGGGGAGGGGTCGGCAATTGAACCGGTG | | | |
| CCTAGAGAAGGTGGCGCGGGGTAAACTGGGAAAGTGATGTC | | | |
| GTGTACTGGCTCCGCCTTTTTCCCGAGGGTGGGGGAGAACC | | | |
| GTATATAAGTGCAGTAGTCGCCGTGAACGTTCTTTTTCGCA | | | |
| ACGGGTTTGCCGCCAGAACACAGGTAAGTGCCGTGTGTGGT | | | |
| TCCCGCGGGCCTGGCCTCTTTACGGGTTATGGCCCTTGCGT | | | |
| GCCTTGAATTACTTCCACCTGGCTGCAGTACGTGATTCTTG | | | |
| ATCCCGAGCTTCGGGTTGGAAGTGGGTGGGAGAGTTCGAGG | | | |
| CCTTGCGCTTAAGGAGCCCCTTCGCCTCGTGCTTGAGTTGA | | | |
| GGCCTGGCCTGGGCGCTGGGGCCGCCGCGTGCGAATCTGGT | | | |
| GGCACCTTCGCGCCTGTCTCGCTGCTTTCGATAAGTCTCTA | | | |
| GCCATTTAAAATTTTTGATGACCTGCTGCGACGCTTTTTTT | | | |
| CTGGCAAGATAGTCTTGTAAATGCGGGCCAAGATCTGCACA | | | |
| CTGGTATTTCGGTTTTTGGGGCCGCGGGCGGCGACGGGGCC | | | |
| CGTGCGTCCCAGCGCACATGTTCGGCGAGGCGGGGCCTGCG | | | |
| AGCGCGGCCACCGAGAATCGGACGGGGGTAGTCTCAAGCTG | | | |
| GCCGGCCTGCTCTGGTGCCTGGCCTCGCGCCGCCGTGTATC | | | |
| GCCCCGCCCTGGGCGGCAAGGCTGGCCCGGTCGGCACCAGT | | | |
| TGCGTGAGCGGAAAGATGGCCGCTTCCCGGCCCTGCTGCAG | | | |
| GGAGCTCAAAATGGAGGACGCGGCGCTCGGGAGAGCGGGCG | | | |
| GGTGAGTCACCCACACAAAGGAAAAGGGCCTTTCCGTCCTC | | | |
| AGCCGTCGCTTCATGTGACTCCACGGAGTACCGGGCGCCGT | | | |
| CCAGGCACCTCGATTAGTTCTCGAGCTTTTGGAGTACGTCG | | | |
| TCTTTAGGTTGGGGGGAGGGGTTTTATGCGATGGAGTTTCC | | | |
| CCACACTGAGTGGGTGGAGACTGAAGTTAGGCCAGCTTGGC | | | |
| ACTTGATGTAATTCTCCTTGGAATTTGCCCTTTTTGAGTTT | | | |
| GGATCTTGGTTCATTCTCAAGCCTCAGACAGTGGTTCAAAG | | | |
| TTTTTTTCTTCCATTTCAGGTGTCGTGAGGAATTCGGTACC | | | |
| GCGGCCGCCCGGGGATCCATGGCCTTACCAGTGACCGCCTT | | | |
| GCTCCTGCCGCTGGCCTTGCTGCTCCACGCCGCCAGGCCGG | | | |
| ACGCCGTTGTGACCCAGGAATCCGCTCTGACCTCTTCTCCA | | | |
| GGCGAAACCGTGACTCTGACTTGCCGTAGTAGCACCGGGGC | | | |
| TGTGACCACATCTAACTATGCCAGTTGGGTCCAGGAAAAAC | | | |
| CGGATCACCTGTTTACTGGCCTGATTGGCGGCACCAACAAT | | | |
| CGCGCACCGGGTGTGCCCGCTCGTTTCAGCGGTTCCCTGAT | | | |
| TGGGGACAAGGCAGCACTGACTATCACCGGCGCCCAGACCG | | | |
| AAGATGAGGCGATCTATTTTTGCGTCCTGTGGTACAGCGAC | | | |
| CATTGGGTGTTCGGGGGAGGCACCAAACTGACAGTGCTGGG | | | |
| CGGAGGAGGAGGTTCAGGAGGAGGAGGTAGCGGGGGAGGCG | | | |
| GTTCCGGGGGAGGCGGTTCTGATGTGCAGCTGCAAGAATCC | | | |
| GGGCCAGGACTGGTTGCGCCTTCTCAGAGTCTGTCAATTAC | | | |
| ATGTACTGTTAGTGGCTTTCTGCTGACCGACTATGGTGTGA | | | |
| ACTGGGTTCGTCAGAGCCCAGGCAAGGGTCTGGAGTGGCTG | | | |
| GGAGTGATTTGGGGGGATGGAATCACAGACTACAATAGCGC | | | |
| ACTGAAATCTCGGCTGAGTGTTACCAAAGATAACAGCAAGT | | | |
| CCCAGGTCTTCCTGAAGATGAACAGCCTGCAAAGCGGCGAC | | | |
| TCCGCTCGCTATTACTGCGTTACCGGACTGTTTGATTATTG | | | |
| GGGGCAGGGGACAACTCTGACTGTTTCCTCCACCACGACGC | | | |
| CAGCGCCGCGACCACCAACACCGGCGCCCACCATCGCGTCG | | | |
| CAGCCCCTGTCCCTGCGCCCAGAGGCGTGCCGGCCAGCGGC | | | |
| GGGGGGCGCAGTGCACACGAGGGGGCTGGACTTCGCCTGTG | | | |
| ATATCTACATCTGGGCGCCCTTGGCCGGGACTTGTGGGGTC | | | |
| CTTCTCCTGTCACTGGTTATCACCCTTTACTGCAAACGGGG | | | |
| CAGAAAGAAACTCCTGTATATATTCAAACAACCATTTATGA | | | |
| GACCAGTACAAACTACTCAAGAGGAAGATGGCTGTAGCTGC | | | |
| CGATTTCCAGAAGAAGAAGAAGGAGGATGTGAACTGAGAGT | | | |
| GAAGTTCAGCAGGAGCGCAGACGCCCCCGCGTACAAGCAGG | | | |
| GCCAGAACCAGCTCTATAACGAGCTCAATCTAGGACGAAGA | | | |
| GAGGAGTACGATGTTTTGGACAAGAGACGTGGCCGGGACCC | | | |
| TGAGATGGGGGGAAAGCCGAGAAGGAAGAACCCTCAGGAAG | | | |
| GCCTGTACAATGAACTGCAGAAAGATAAGATGGCGGAGGCC | | | |
| TACAGTGAGATTGGGATGAAAGGCGAGCGCCGGAGGGGCAA | | | |
| GGGGCACGATGGCCTTTACCAGGGTCTCAGTACAGCCACCA | | | |
| AGGACACCTACGACGCCCTTCACATGCAGGCCCTGCCCCCT | | | |
| CGCTAAGTCGACAATCAACCTCTGGATTACAAAATTTGTGA | | | |
| AAGATTGACTGGTATTCTTAACTATGTTGCTCCTTTTACGC | | | |
| TATGTGGATACGCTGCTTTAATGCCTTTGTATCATGCTATT | | | |
| GCTTCCCGTATGGCTTTCATTTTCTCCTCCTTGTATAAATC | | | |
| CTGGTTGCTGTCTCTTTATGAGGAGTTGTGGCCCGTTGTCA | | | |
| GGCAACGTGGCGTGGTGTGCACTGTGTTTGCTGACGCAACC | | | |
| CCCACTGGTTGGGGCATTGCCACCACCTGTCAGCTCCTTTC | | | |
| CGGGACTTTCGCTTTCCCCCTCCCTATTGCCACGGCGGAAC | | | |
| TCATCGCCGCCTGCCTTGCCCGCTGCTGGACAGGGGCTCGG | | | |
| CTGTTGGGCACTGACAATTCCGTGGTGTTGTCGGGGAAGCT | | | |
| GACGTCCTTTCCATGGCTGCTCGCCTGTGTTGCCACCTGGA | | | |
| TTCTGCGCGGGACGTCCTTCTGCTACGTCCCTTCGGCCCTC | | | |
| AATCCAGCGGACCTTCCTTCCCGCGGCCTGCTGCCGGCTCT | | | |
| GCGGCCTCTTCCGCGTCTTCGCCTTCGCCCTCAGACGAGTC | | | |
| GGATCTCCCTTTGGGCCGCCTCCCCGCCTGGAATTCGAGCT | | | |
| CGGTACCTTTAAGACCAATGACTTACAAGGCAGCTGTAGAT | | | |
| CTTAGCCACTTTTTAAAAGAAAAGGGGGGACTGGAAGGGCT | | | |
| AATTCACTCCCAACGAAGACAAGATCTGCTTTTTGCTTGTA | | | |
| CTGGGTCTCTCTGGTTAGACCAGATCTGAGCCTGGGAGCTC | | | |
| TCTGGCTAACTAGGGAACCCACTGCTTAAGCCTCAATAAAG | | | |
| CTTGCCTTGAGTGCTTCAAGTAGTGTGTGCCCGTCTGTTGT | | | |
| GTGACTCTGGTAACTAGAGATCCCTCAGACCCTTTTAGTCA | | | |
| GTGTGGAAAATCTCTAGCAGTAGTAGTTCATGTCATCTTAT | | | |
| TATTCAGTATTTATAACTTGCAAAGAAATGAATATCAGAGA | | | |
| GTGAGAGGAACTTGTTTATTGCAGCTTATAATGGTTACAAA | | | |
| TAAAGCAATAGCATCACAAATTTCACAAATAAAGCATTTTT | | | |
| TTCACTGCATTCTAGTTGTGGTTTGTCCAAACTCATCAATG | | | |
| TATCTTATCATGTCTGGCTCTAGCTATCCCGCCCCTAACTC | | | |
| CGCCCAGTTCCGCCCATTCTCCGCCCCATGGCTGACTAATT | | | |
| TTTTTTATTTATGCAGAGGCCGAGGCCGCCTCGGCCTCTGA | | | |
| GCTATTCCAGAAGTAGTGAGGAGGCTTTTTTGGAGGCCTAG | | | |
| GCTTTTGCGTCGAGACGTACCCAATTCGCCCTATAGTGAGT | | | |
| CGTATTACGCGCGCTCACTGGCCGTCGTTTTACAACGTCGT | | | |
| GACTGGGAAAACCCTGGCGTTACCCAACTTAATCGCCTTGC | | | |
| AGCACATCCCCCTTTCGCCAGCTGGCGTAATAGCGAAGAGG | | | |
| CCCGCACCGATCGCCCTTCCCAACAGTTGCGCAGCCTGAAT | | | |
| GGCGAATGGCGCGACGCGCCCTGTAGCGGCGCATTAAGCGC | | | |
| GGCGGGTGTGGTGGTTACGCGCAGCGTGACCGCTACACTTG | | | |
| CCAGCGCCCTAGCGCCCGCTCCTTTCGCTTTCTTCCCTTCC | | | |
| TTTCTCGCCACGTTCGCCGGCTTTCCCCGTCAAGCTCTAAA | | | |
| TCGGGGGCTCCCTTTAGGGTTCCGATTTAGTGCTTTACGGC | | | |
| ACCTCGACCCCAAAAAACTTGATTAGGGTGATGGTTCACGT | | | |
| AGTGGGCCATCGCCCTGATAGACGGTTTTTCGCCCTTTGAC | | | |
| GTTGGAGTCCACGTTCTTTAATAGTGGACTCTTGTTCCAAA | | | |
| CTGGAACAACACTCAACCCTATCTCGGTCTATTCTTTTGAT | | | |
| TTATAAGGGATTTTGCCGATTTCGGCCTATTGGTTAAAAAA | | | |
| TGAGCTGATTTAACAAAAATTTAACGCGAATTTTAACAAAA | | | |
| TATTAACGTTTACAATTTCC | | | |
| DIVMTQTPLTLSVTFGQPASISCKSSQSLLDSDGQTYLNWL | 67 | CAR- | Amino |
| LQRPGQSPKRLIYLVSKLDSGVPDRFTGSGSGTDFTLKISR | | FLAG_(IgG4m_hinge) | Acid |
| VEAEDLGVYYCWQGTHFPWTFGGGTKLEIKGGGGSGGGGSG | | | |
| GGGSEVQLQQSGAELVKPGASVKLSCTASGFNIKDYYMHWV | | | |
| KQRTEQGLEWIGRIDPEDGETKYAPKFQGKATITADTSSKT | | | |
| AYLQLSSLTSEDTAVYYCARLKGGYWGQGTTLTVSSESKYG | | | |
| PPCPPCPDIYIWAPLAGTCGVLLLSLVITLYCKRGRKKLLY | | | |
| IFKQPFMRPVQTTQEEDGCSCRFPEEEEGGCELRVKFSRSA | | | |
| DAPAYKQGQNQLYNELNLGRREEYDVLDKRRGRDPEMGGKP | | | |
| RRKNPQEGLYNELQKDKMAEAYSEIGMKGERRRGKGHDGLY | | | |
| QGLSTATKDTYDALHMQALPPR | | | |
| ATGGCCTTACCAGTGACCGCCTTGCTCCTGCCGCTGGCCTT | 68 | LV-EF1a- | DNA |
| GCTGCTCCACGCCGCCAGGCCGGACGCCGTTGTGACCCAGG | | GCN4(52SR4)- | |
| AATCCGCTCTGACCTCTTCTCCAGGCGAAACCGTGACTCTG | | BBZ_IgG4(Pro) | |
| ACTTGCCGTAGTAGCACCGGGGCTGTGACCACATCTAACTA | | | |
| TGCCAGTTGGGTCCAGGAAAAACCGGATCACCTGTTTACTG | | | |
| GCCTGATTGGCGGCACCAACAATCGCGCACCGGGTGTGCCC | | | |
| GCTCGTTTCAGCGGTTCCCTGATTGGGGACAAGGCAGCACT | | | |
| GACTATCACCGGCGCCCAGACCGAAGATGAGGCGATCTATT | | | |
| TTTGCGTCCTGTGGTACAGCGACCATTGGGTGTTCGGGGGA | | | |
| GGCACCAAACTGACAGTGCTGGGCGGAGGAGGAGGTTCAGG | | | |
| AGGAGGAGGTAGCGGGGGAGGCGGTTCCGGGGGAGGCGGTT | | | |
| CTGATGTGCAGCTGCAAGAATCCGGGCCAGGACTGGTTGCG | | | |
| CCTTCTCAGAGTCTGTCAATTACATGTACTGTTAGTGGCTT | | | |
| TCTGCTGACCGACTATGGTGTGAACTGGGTTCGTCAGAGCC | | | |
| CAGGCAAGGGTCTGGAGTGGCTGGGAGTGATTTGGGGGGAT | | | |
| GGAATCACAGACTACAATAGCGCACTGAAATCTCGGCTGAG | | | |
| TGTTACCAAAGATAACAGCAAGTCCCAGGTCTTCCTGAAGA | | | |
| TGAACAGCCTGCAAAGCGGCGACTCCGCTCGCTATTACTGC | | | |
| GTTACCGGACTGTTTGATTATTGGGGGCAGGGGACAACTCT | | | |
| GACTGTTTCCTCCGAAAGCAAGTATGGCCCACCTTGTCCAA | | | |
| GCTGTCCCGATATCTACATCTGGGCGCCCTTGGCCGGGACT | | | |
| TGTGGGGTCCTTCTCCTGTCACTGGTTATCACCCTTTACTG | | | |
| CAAACGGGGCAGAAAGAAACTCCTGTATATATTCAAACAAC | | | |
| CATTTATGAGACCAGTACAAACTACTCAAGAGGAAGATGGC | | | |
| TGTAGCTGCCGATTTCCAGAAGAAGAAGAAGGAGGATGTGA | | | |
| ACTGAGAGTGAAGTTCAGCAGGAGCGCAGACGCCCCCGCGT | | | |
| ACAAGCAGGGCCAGAACCAGCTCTATAACGAGCTCAATCTA | | | |
| GGACGAAGAGAGGAGTACGATGTTTTGGACAAGAGACGTGG | | | |
| CCGGGACCCTGAGATGGGGGGAAAGCCGAGAAGGAAGAACC | | | |
| CTCAGGAAGGCCTGTACAATGAACTGCAGAAAGATAAGATG | | | |
| GCGGAGGCCTACAGTGAGATTGGGATGAAAGGCGAGCGCCG | | | |
| GAGGGGCAAGGGGCACGATGGCCTTTACCAGGGTCTCAGTA | | | |
| CAGCCACCAAGGACACCTACGACGCCCTTCACATGCAGGCC | | | |
| CTGCCCCCTCGC | | | |
| ATGGCCTTACCAGTGACCGCCTTGCTCCTGCCGCTGGCCTT | 69 | LV-EF1a- | DNA |
| GCTGCTCCACGCCGCCAGGCCGGACGCCGTTGTGACCCAGG | | GCN4(52SR4)- | |
| AATCCGCTCTGACCTCTTCTCCAGGCGAAACCGTGACTCTG | | BBZ_IgG4(Ser) | |
| ACTTGCCGTAGTAGCACCGGGGCTGTGACCACATCTAACTA | | | |
| TGCCAGTTGGGTCCAGGAAAAACCGGATCACCTGTTTACTG | | | |
| GCCTGATTGGCGGCACCAACAATCGCGCACCGGGTGTGCCC | | | |
| GCTCGTTTCAGCGGTTCCCTGATTGGGGACAAGGCAGCACT | | | |
| GACTATCACCGGCGCCCAGACCGAAGATGAGGCGATCTATT | | | |
| TTTGCGTCCTGTGGTACAGCGACCATTGGGTGTTCGGGGGA | | | |
| GGCACCAAACTGACAGTGCTGGGCGGAGGAGGAGGTTCAGG | | | |
| AGGAGGAGGTAGCGGGGGAGGCGGTTCCGGGGGAGGCGGTT | | | |
| CTGATGTGCAGCTGCAAGAATCCGGGCCAGGACTGGTTGCG | | | |
| CCTTCTCAGAGTCTGTCAATTACATGTACTGTTAGTGGCTT | | | |
| TCTGCTGACCGACTATGGTGTGAACTGGGTTCGTCAGAGCC | | | |
| CAGGCAAGGGTCTGGAGTGGCTGGGAGTGATTTGGGGGGAT | | | |
| GGAATCACAGACTACAATAGCGCACTGAAATCTCGGCTGAG | | | |
| TGTTACCAAAGATAACAGCAAGTCCCAGGTCTTCCTGAAGA | | | |
| TGAACAGCCTGCAAAGCGGCGACTCCGCTCGCTATTACTGC | | | |
| GTTACCGGACTGTTTGATTATTGGGGGCAGGGGACAACTCT | | | |
| GACTGTTTCCTCCGAAAGCAAGTATGGCCCACCTTGTCCAC | | | |
| CTTGTCCCGATATCTACATCTGGGCGCCCTTGGCCGGGACT | | | |
| TGTGGGGTCCTTCTCCTGTCACTGGTTATCACCCTTTACTG | | | |
| CAAACGGGGCAGAAAGAAACTCCTGTATATATTCAAACAAC | | | |
| CATTTATGAGACCAGTACAAACTACTCAAGAGGAAGATGGC | | | |
| TGTAGCTGCCGATTTCCAGAAGAAGAAGAAGGAGGATGTGA | | | |
| ACTGAGAGTGAAGTTCAGCAGGAGCGCAGACGCCCCCGCGT | | | |
| ACAAGCAGGGCCAGAACCAGCTCTATAACGAGCTCAATCTA | | | |
| GGACGAAGAGAGGAGTACGATGTTTTGGACAAGAGACGTGG | | | |
| CCGGGACCCTGAGATGGGGGGAAAGCCGAGAAGGAAGAACC | | | |
| CTCAGGAAGGCCTGTACAATGAACTGCAGAAAGATAAGATG | | | |
| GCGGAGGCCTACAGTGAGATTGGGATGAAAGGCGAGCGCCG | | | |
| GAGGGGCAAGGGGCACGATGGCCTTTACCAGGGTCTCAGTA | | | |
| CAGCCACCAAGGACACCTACGACGCCCTTCACATGCAGGCC | | | |
| CTGCCCCCTCGC | | | |
| ATGGCCTTACCAGTGACCGCCTTGCTCCTGCCGCTGGCCTTGCTG | 70 | LV-EF1a- | DNA |
| CTCCACGCCGCCAGGCCGCAGGCGGTAGTCACCCAGGAGCCAA | | huGCN4- | |
| GTCTCACGGTGAGCCCCGGCGGTACCGTCACACTTACATGCGGA | | BBZ_L2, H2 | |
| AGCTCTACCGGGGCTGTGACCACAAGCAACTACGCATCCTGGGT | | | |
| CCAGCAGAAACCCGGTCAGGCTCCTCGGGGCCTCATTGGTGGGA | | | |
| CAAATAACAGAGCCCCGGGTGTTCCCGCCCGATTTTCTGGCAGTC | | | |
| TTCTGGGAGGAAAGGCCGCTCTGACAATATCTGGCGCACAGCCC | | | |
| GAAGACGAGGCCGAGTACTATTGCGTGTTGTGGTATAGCGACCA | | | |
| CTGGGTATTCGGTGGAGGAACAAAGCTGACAGTGCTCGGCGGT | | | |
| GGAGGGAGTGGTGGCGGTGGCAGCGGAGGGGGCGGATCACAA | | | |
| GTGCAATTGCAGGAGAGTGGACCTGGACTCGTGAAACCATCTGA | | | |
| AACACTCTCCCTGACTTGTACGGTTTCAGGGTTCCTGCTGACAGA | | | |
| CTATGGAGTAAACTGGATCAGGCAGCCACCCGGCAAGGGCTTG | | | |
| GAGTGGATTGGCGTCATTTGGGGCGACGGAATCACCGACTATAA | | | |
| CCCATCACTCAAATCTCGGGTGACCATTTCCAAGGATACCAGTAA | | | |
| GAATCAGTTCAGCCTGAAACTTTCATCCGTGACAGCTGCGGACAC | | | |
| CGCCGTGTACTACTGTGTGACAGGACTTTTTGACTACTGGGGCCA | | | |
| GGGGACCCTGGTGACAGTTAGCTCCACCACGACGCCAGCGCCGC | | | |
| GACCACCAACACCGGCGCCCACCATCGCGTCGCAGCCCCTGTCCC | | | |
| TGCGCCCAGAGGCGTGCCGGCCAGCGGCGGGGGGCGCAGTGCA | | | |
| CACGAGGGGGCTGGACTTCGCCTGTGATATCTACATCTGGGCGC | | | |
| CCTTGGCCGGGACTTGTGGGGTCCTTCTCCTGTCACTGGTTATCA | | | |
| CCCTTTACTGCAAACGGGGCAGAAAGAAACTCCTGTATATATTCA | | | |
| AACAACCATTTATGAGACCAGTACAAACTACTCAAGAGGAAGAT | | | |
| GGCTGTAGCTGCCGATTTCCAGAAGAAGAAGAAGGAGGATGTG | | | |
| AACTGAGAGTGAAGTTCAGCAGGAGCGCAGACGCCCCCGCGTA | | | |
| CAAGCAGGGCCAGAACCAGCTCTATAACGAGCTCAATCTAGGAC | | | |
| GAAGAGAGGAGTACGATGTTTTGGACAAGAGACGTGGCCGGGA | | | |
| CCCTGAGATGGGGGGAAAGCCGAGAAGGAAGAACCCTCAGGAA | | | |
| GGCCTGTACAATGAACTGCAGAAAGATAAGATGGCGGAGGCCT | | | |
| ACAGTGAGATTGGGATGAAAGGCGAGCGCCGGAGGGGCAAGG | | | |
| GGCACGATGGCCTTTACCAGGGTCTCAGTACAGCCACCAAGGAC | | | |
| ACCTACGACGCCCTTCACATGCAGGCCCTGCCCCCTCGC | | | |
| atggccttaccagtgaccgccttgctcctgccgctggccttgctgctccacgccgccag | 71 | LV-EF1a- | DNA |
| gccgCAGGCGGTAGTCACCCAGGAGCCAAGTCTCACGGTGAGCC | | huGCN4- | |
| CCGGCGGTACCGTCACACTTACATGCGGAAGCTCTACCGGGGCT | | BBZ_L2, H3 | |
| GTGACCACAAGCAACTACGCATCCTGGGTCCAGCAGAAACCCGG | | | |
| TCAGGCGCCCCGGGGCCTCATTGGTGGGACAAATAACAGAGCCC | | | |
| CGGGTGTTCCCGCCCGATTTTCTGGCAGTCTTCTGGGAGGAAAG | | | |
| GCCGCTCTGACAATATCTGGCGCACAGCCCGAAGACGAGGCCGA | | | |
| GTACTATTGCGTGTTGTGGTATAGCGACCACTGGGTATTCGGTG | | | |
| GAGGAACAAAGCTGACAGTGCTCGGCGGTGGAGGGAGTGGTG | | | |
| GCGGTGGCAGCGGAGGGGGCGGATCACAAGTGCAATTGCAGG | | | |
| AGAGTGGACCTGGACTCGTGAAACCATCTGAAACACTCTCCATA | | | |
| ACTTGTACGGTTTCAGGGTTCCTGCTGACAGACTATGGAGTAAAC | | | |
| TGGGTTAGGCAGCCACCCGGCAAGGGCTTGGAGTGGCTGGGCG | | | |
| TCATTTGGGGCGACGGAATCACCGACTATAACCCATCACTCAAAT | | | |
| CTCGGCTTACCGTCTCCAAGGATACGAGTAAGAATCAGGTCAGC | | | |
| CTGAAAATGTCATCCCTCACAGCTGCGGACACCGCCGTGTACTAC | | | |
| TGTGTGACAGGACTTTTTGACTACTGGGGCCAGGGGACCCTGCT | | | |
| CACAGTTAGCTCCaccacgacgccagcgccgcgaccaccaacaccggcgccca | | | |
| ccatcgcgtcgcagcccctgtccctgcgcccagaggcgtgccggccagcggcggggg | | | |
| gcgcagtgcacacgagggggctggacttcgcctgtgatatctacatctgggcgccctt | | | |
| ggccgggacttgtggggtccttctcctgtcactggttatcaccctttactgcaaacggg | | | |
| gcagaaagaaactcctgtatatattcaaacaaccatttatgagaccagtacaaacta | | | |
| ctcaagaggaagatggctgtagctgccgatttccagaagaagaagaaggaggatgt | | | |
| gaactgagagtgaagttcagcaggagcgcagacgcccccgcgtacaagcagggcca | | | |
| gaaccagctctataacgagctcaatctaggacgaagagaggagtacgatgttttgga | | | |
| caagagacgtggccgggaccctgagatggggggaaagccgagaaggaagaaccct | | | |
| caggaaggcctgtacaatgaactgcagaaagataagatggcggaggcctacagtga | | | |
| gattgggatgaaaggcgagcgccggaggggcaaggggcacgatggcctttaccagg | | | |
| gtctcagtacagccaccaaggacacctacgacgcccttcacatgcaggccctgcccc | | | |
| ctcgc | | | |
| atggccttaccagtgaccgccttgctcctgccgctggccttgctgctccacgccgccag | 72 | LV-EF1a- | DNA |
| gccgCAGGCGGTAGTCACCCAGGAGCCAAGTCTCACGGTGAGCC | | huGCN4- | |
| CCGGCGGTACCGTCACACTTACATGCGGAAGCTCTACCGGGGCT | | BBZ_L3, H2 | |
| GTGACCACAAGCAACTACGCATCCTGGGTCCAGCAGAAACCCGG | | | |
| ACAAGCGTTCCGGGGCCTCATTGGTGGGACAAATAACAGAGCCC | | | |
| CGGGTGTTCCCGCCCGATTTTCTGGCAGTCTTCTGGGAGGAAAG | | | |
| GCCGCTCTGACAATATCTGGCGCACAGCCCGAAGACGAGGCCGA | | | |
| GTACTATTGCGTGTTGTGGTATAGCGACCACTGGGTATTCGGTG | | | |
| GAGGAACAAAGCTGACAGTGCTCGGCGGTGGAGGGAGTGGTG | | | |
| GCGGTGGCAGCGGAGGGGGCGGATCACAAGTGCAATTGCAGG | | | |
| AGAGTGGACCTGGACTCGTGAAACCATCTGAAACACTCTCCCTCA | | | |
| CTTGTACGGTTTCAGGGTTCCTGCTGACAGACTATGGAGTAAACT | | | |
| GGATTAGGCAGCCACCCGGCAAGGGCTTGGAGTGGATCGGCGT | | | |
| CATTTGGGGCGACGGAATCACCGACTATAACCCATCACTCAAATC | | | |
| TCGGGTCACCATCTCCAAGGATACCAGTAAGAATCAGTTCAGCCT | | | |
| GAAACTGTCATCCGTCACAGCTGCGGACACCGCCGTGTACTACT | | | |
| GTGTGACAGGACTTTTTGACTACTGGGGCCAGGGGACCCTGGTA | | | |
| ACAGTTAGCTCCaccacgacgccagcgccgcgaccaccaacaccggcgcccac | | | |
| catcgcgtcgcagcccctgtccctgcgcccagaggcgtgccggccagcggcgggggg | | | |
| cgcagtgcacacgagggggctggacttcgcctgtgatatctacatctgggcgcccttg | | | |
| gccgggacttgtggggtccttctcctgtcactggttatcaccctttactgcaaacgggg | | | |
| cagaaagaaactcctgtatatattcaaacaaccatttatgagaccagtacaaactact | | | |
| caagaggaagatggctgtagctgccgatttccagaagaagaagaaggaggatgtga | | | |
| actgagagtgaagttcagcaggagcgcagacgcccccgcgtacaagcagggccaga | | | |
| accagctctataacgagctcaatctaggacgaagagaggagtacgatgttttggaca | | | |
| agagacgtggccgggaccctgagatggggggaaagccgagaaggaagaaccctca | | | |
| ggaaggcctgtacaatgaactgcagaaagataagatggcggaggcctacagtgaga | | | |
| ttgggatgaaaggcgagcgccggaggggcaaggggcacgatggcctttaccagggt | | | |
| ctcagtacagccaccaaggacacctacgacgcccttcacatgcaggccctgccccctc | | | |
| gc | | | |
| atggccttaccagtgaccgccttgctcctgccgctggccttgctgctccacgccgccag | 73 | LV-EF1a- | DNA |
| gccgCAGGCGGTAGTCACCCAGGAGCCAAGTCTCACGGTGAGCC | | huGCN4- | |
| CCGGCGGTACCGTCACACTTACATGCGGAAGCTCTACCGGGGCT | | BBZ_L3, H3 | |
| GTGACCACAAGCAACTACGCATCCTGGGTCCAGCAGAAACCCGG | | | |
| TCAGGCATTCCGGGGCCTCATTGGTGGGACAAATAACAGAGCCC | | | |
| CGGGTGTTCCCGCCCGATTTTCTGGCAGTCTTCTGGGAGGAAAG | | | |
| GCCGCTCTGACAATATCTGGCGCACAGCCCGAAGACGAGGCCGA | | | |
| GTACTATTGCGTGTTGTGGTATAGCGACCACTGGGTATTCGGTG | | | |
| GAGGAACAAAGCTGACAGTGCTCGGCGGTGGAGGGAGTGGTG | | | |
| GCGGTGGCAGCGGAGGGGGCGGATCACAAGTGCAATTGCAGG | | | |
| AGAGTGGACCTGGACTCGTGAAACCATCTGAAACACTCTCCATA | | | |
| ACTTGTACGGTTTCAGGGTTCCTGCTGACAGACTATGGAGTAAAC | | | |
| TGGGTCAGGCAGCCACCCGGCAAGGGCTTGGAGTGGCTCGGCG | | | |
| TCATTTGGGGCGACGGAATCACCGACTATAACCCATCACTCAAAT | | | |
| CTCGGTTGACCGTGTCCAAGGATACCAGTAAGAATCAGGTCAGC | | | |
| CTGAAAATGTCATCCCTGACAGCTGCGGACACCGCCGTGTACTAC | | | |
| TGTGTGACAGGACTTTTTGACTACTGGGGCCAGGGGACCCTGTT | | | |
| GACAGTTAGCTCCaccacgacgccagcgccgcgaccaccaacaccggcgccc | | | |
| accatcgcgtcgcagcccctgtccctgcgcccagaggcgtgccggccagcggcgggg | | | |
| ggcgcagtgcacacgagggggctggacttcgcctgtgatatctacatctgggcgccct | | | |
| tggccgggacttgtggggtccttctcctgtcactggttatcaccctttactgcaaacggg | | | |
| gcagaaagaaactcctgtatatattcaaacaaccatttatgagaccagtacaaacta | | | |
| ctcaagaggaagatggctgtagctgccgatttccagaagaagaagaaggaggatgt | | | |
| gaactgagagtgaagttcagcaggagcgcagacgcccccgcgtacaagcagggcca | | | |
| gaaccagctctataacgagctcaatctaggacgaagagaggagtacgatgttttgga | | | |
| caagagacgtggccgggaccctgagatggggggaaagccgagaaggaagaaccct | | | |
| caggaaggcctgtacaatgaactgcagaaagataagatggcggaggcctacagtga | | | |
| gattgggatgaaaggcgagcgccggaggggcaaggggcacgatggcctttaccagg | | | |
| gtctcagtacagccaccaaggacacctacgacgcccttcacatgcaggccctgcccc | | | |
| ctcgc | | | |
| atggccttaccagtgaccgccttgctcctgccgctggccttgctgctccacgccgccag | 74 | LV-EF1a- | DNA |
| gccgCAGGCGGTAGTCACCCAGGAGCCAAGTCTCACGGTGAGCC | | huGCN4- | |
| CCGGCGGTACCGTCACACTTACATGCGGAAGCTCTACCGGGGCT | | BBZ_L4, H2 | |
| GTGACCACAAGCAACTACGCATCCTGGGTCCAGCAGAAACCCGA | | | |
| TCACCTGTTCCGGGGCCTCATTGGTGGGACAAATAACAGAGCCC | | | |
| CGGGTGTTCCCGCCCGATTTTCTGGCAGTCTTCTGGGAGGAAAG | | | |
| GCCGCTCTGACAATATCTGGCGCACAGCCCGAAGACGAGGCCGA | | | |
| GTACTATTGCGTGTTGTGGTATAGCGACCACTGGGTATTCGGTG | | | |
| GAGGAACAAAGCTGACAGTGCTCGGCGGTGGAGGGAGTGGTG | | | |
| GCGGTGGCAGCGGAGGGGGCGGATCACAAGTGCAATTGCAGG | | | |
| AGAGTGGACCTGGACTCGTGAAACCATCTGAAACACTCTCCCTTA | | | |
| CTTGTACGGTTTCAGGGTTCCTGCTGACAGACTATGGAGTAAACT | | | |
| GGATCAGGCAGCCACCCGGCAAGGGCTTGGAGTGGATCGGCGT | | | |
| CATTTGGGGCGACGGAATCACCGACTATAACCCATCACTCAAATC | | | |
| TCGGGTCACCATCTCCAAGGATACGAGTAAGAATCAGTTCAGCC | | | |
| TGAAACTCTCATCCGTTACAGCTGCGGACACCGCCGTGTACTACT | | | |
| GTGTGACAGGACTTTTTGACTACTGGGGCCAGGGGACCCTGGTA | | | |
| ACAGTTAGCTCCaccacgacgccagcgccgcgaccaccaacaccggcgcccac | | | |
| catcgcgtcgcagcccctgtccctgcgcccagaggcgtgccggccagcggcgggggg | | | |
| cgcagtgcacacgagggggctggacttcgcctgtgatatctacatctgggcgcccttg | | | |
| gccgggacttgtggggtccttctcctgtcactggttatcaccctttactgcaaacgggg | | | |
| cagaaagaaactcctgtatatattcaaacaaccatttatgagaccagtacaaactact | | | |
| caagaggaagatggctgtagctgccgatttccagaagaagaagaaggaggatgtga | | | |
| actgagagtgaagttcagcaggagcgcagacgcccccgcgtacaagcagggccaga | | | |
| accagctctataacgagctcaatctaggacgaagagaggagtacgatgttttggaca | | | |
| agagacgtggccgggaccctgagatggggggaaagccgagaaggaagaaccctca | | | |
| ggaaggcctgtacaatgaactgcagaaagataagatggcggaggcctacagtgaga | | | |
| ttgggatgaaaggcgagcgccggaggggcaaggggcacgatggcctttaccagggt | | | |
| ctcagtacagccaccaaggacacctacgacgcccttcacatgcaggccctgccccctc | | | |
| gc | | | |
| atggccttaccagtgaccgccttgctcctgccgctggccttgctgctccacgccgccag | 75 | LV-EF1a- | DNA |
| gccgCAGGCGGTAGTCACCCAGGAGCCAAGTCTCACGGTGAGCC | | huGCN4- | |
| CCGGCGGTACCGTCACACTTACATGCGGAAGCTCTACCGGGGCT | | BBZ_L4, H3 | |
| GTGACCACAAGCAACTACGCATCCTGGGTCCAGCAGAAACCCGA | | | |
| CCATCTGTTTCGGGGCCTCATTGGTGGGACAAATAACAGAGCCC | | | |
| CGGGTGTTCCCGCCCGATTTTCTGGCAGTCTTCTGGGAGGAAAG | | | |
| GCCGCTCTGACAATATCTGGCGCACAGCCCGAAGACGAGGCCGA | | | |
| GTACTATTGCGTGTTGTGGTATAGCGACCACTGGGTATTCGGTG | | | |
| GAGGAACAAAGCTGACAGTGCTCGGCGGTGGAGGGAGTGGTG | | | |
| GCGGTGGCAGCGGAGGGGGCGGATCACAAGTGCAATTGCAGG | | | |
| AGAGTGGACCTGGACTCGTGAAACCATCTGAAACACTCTCCATTA | | | |
| CTTGTACGGTTTCAGGGTTCCTGCTGACAGACTATGGAGTAAACT | | | |
| GGGTGAGGCAGCCACCCGGCAAGGGCTTGGAGTGGCTCGGCGT | | | |
| CATTTGGGGCGACGGAATCACCGACTATAACCCATCACTCAAATC | | | |
| TCGGTTGACCGTGTCCAAGGATACCAGTAAGAATCAGGTGAGCC | | | |
| TGAAAATGTCATCCCTGACAGCTGCGGACACCGCCGTGTACTACT | | | |
| GTGTGACAGGACTTTTTGACTACTGGGGCCAGGGGACCCTGCTG | | | |
| ACAGTTAGCTCCaccacgacgccagcgccgcgaccaccaacaccggcgcccac | | | |
| catcgcgtcgcagcccctgtccctgcgcccagaggcgtgccggccagcggcgggggg | | | |
| cgcagtgcacacgagggggctggacttcgcctgtgatatctacatctgggcgcccttg | | | |
| gccgggacttgtggggtccttctcctgtcactggttatcaccctttactgcaaacgggg | | | |
| cagaaagaaactcctgtatatattcaaacaaccatttatgagaccagtacaaactact | | | |
| caagaggaagatggctgtagctgccgatttccagaagaagaagaaggaggatgtga | | | |
| actgagagtgaagttcagcaggagcgcagacgcccccgcgtacaagcagggccaga | | | |
| accagctctataacgagctcaatctaggacgaagagaggagtacgatgttttggaca | | | |
| agagacgtggccgggaccctgagatggggggaaagccgagaaggaagaaccctca | | | |
| ggaaggcctgtacaatgaactgcagaaagataagatggcggaggcctacagtgaga | | | |
| ttgggatgaaaggcgagcgccggaggggcaaggggcacgatggcctttaccagggt | | | |
| ctcagtacagccaccaaggacacctacgacgcccttcacatgcaggccctgccccctc | | | |
| gc | | | |
| atggccttaccagtgaccgccttgctcctgccgctggccttgctgctccacgccgccag | 76 | LV-EF1a- | DNA |
| gccgGACGCCGTTGTGACCCAGGAATCCGCTCTGACCTCTTCTCCA | | GCN4(52SR4)- | |
| GGCGAAACCGTGACTCTGACTTGCCGTAGTAGCACCGGGGCTGT | | BBZ_CD8 hinge | |
| GACCACATCTAACTATGCCAGTTGGGTCCAGGAAAAACCGGATC | | | |
| ACCTGTTTACTGGCCTGATTGGCGGCACCAACAATCGCGCACCG | | | |
| GGTGTGCCCGCTCGTTTCAGCGGTTCCCTGATTGGGGACAAGGC | | | |
| AGCACTGACTATCACCGGCGCCCAGACCGAAGATGAGGCGATCT | | | |
| ATTTTTGCGTCCTGTGGTACAGCGACCATTGGGTGTTCGGGGGA | | | |
| GGCACCAAACTGACAGTGCTGGGCGGAGGAGGAGGTTCAGGAG | | | |
| GAGGAGGTAGCGGGGGAGGCGGTTCCGGGGGAGGCGGTTCTG | | | |
| ATGTGCAGCTGCAAGAATCCGGGCCAGGACTGGTTGCGCCTTCT | | | |
| CAGAGTCTGTCAATTACATGTACTGTTAGTGGCTTTCTGCTGACC | | | |
| GACTATGGTGTGAACTGGGTTCGTCAGAGCCCAGGCAAGGGTCT | | | |
| GGAGTGGCTGGGAGTGATTTGGGGGGATGGAATCACAGACTAC | | | |
| AATAGCGCACTGAAATCTCGGCTGAGTGTTACCAAAGATAACAG | | | |
| CAAGTCCCAGGTCTTCCTGAAGATGAACAGCCTGCAAAGCGGCG | | | |
| ACTCCGCTCGCTATTACTGCGTTACCGGACTGTTTGATTATTGGG | | | |
| GGCAGGGGACAACTCTGACTGTTTCCTCCaccacgacgccagcgccgc | | | |
| gaccaccaacaccggcgcccaccatcgcgtcgcagcccctgtccctgcgcccagagg | | | |
| cgtgccggccagcggcggggggcgcagtgcacacgagggggctggacttcgcctgt | | | |
| gatatctacatctgggcgcccttggccgggacttgtggggtccttctcctgtcactggtt | | | |
| atcaccctttactgcaaacggggcagaaagaaactcctgtatatattcaaacaaccat | | | |
| ttatgagaccagtacaaactactcaagaggaagatggctgtagctgccgatttccag | | | |
| aagaagaagaaggaggatgtgaactgagagtgaagttcagcaggagcgcagacgc | | | |
| ccccgcgtacaagcagggccagaaccagctctataacgagctcaatctaggacgaa | | | |
| gagaggagtacgatgttttggacaagagacgtggccgggaccctgagatgggggga | | | |
| aagccgagaaggaagaaccctcaggaaggcctgtacaatgaactgcagaaagata | | | |
| agatggcggaggcctacagtgagattgggatgaaaggcgagcgccggaggggcaa | | | |
| ggggcacgatggcctttaccagggtctcagtacagccaccaaggacacctacgacgc | | | |
| ccttcacatgcaggccctgccccctcgc | | | |
| atggccttaccagtgaccgccttgctcctgccgctggccttgctgctccacgccgccag | 77 | LV-EF1a- | DNA |
| gccgGACGCCGTTGTGACCCAGGAATCCGCTCTGACCTCTTCTCCA | | GCN4(52SR4)- | |
| GGCGAAACCGTGACTCTGACTTGCCGTAGTAGCACCGGGGCTGT | | BBZ_no hinge | |
| GACCACATCTAACTATGCCAGTTGGGTCCAGGAAAAACCGGATC | | | |
| ACCTGTTTACTGGCCTGATTGGCGGCACCAACAATCGCGCACCG | | | |
| GGTGTGCCCGCTCGTTTCAGCGGTTCCCTGATTGGGGACAAGGC | | | |
| AGCACTGACTATCACCGGCGCCCAGACCGAAGATGAGGCGATCT | | | |
| ATTTTTGCGTCCTGTGGTACAGCGACCATTGGGTGTTCGGGGGA | | | |
| GGCACCAAACTGACAGTGCTGGGCGGAGGAGGAGGTTCAGGAG | | | |
| GAGGAGGTAGCGGGGGAGGCGGTTCCGGGGGAGGCGGTTCTG | | | |
| ATGTGCAGCTGCAAGAATCCGGGCCAGGACTGGTTGCGCCTTCT | | | |
| CAGAGTCTGTCAATTACATGTACTGTTAGTGGCTTTCTGCTGACC | | | |
| GACTATGGTGTGAACTGGGTTCGTCAGAGCCCAGGCAAGGGTCT | | | |
| GGAGTGGCTGGGAGTGATTTGGGGGGATGGAATCACAGACTAC | | | |
| AATAGCGCACTGAAATCTCGGCTGAGTGTTACCAAAGATAACAG | | | |
| CAAGTCCCAGGTCTTCCTGAAGATGAACAGCCTGCAAAGCGGCG | | | |
| ACTCCGCTCGCTATTACTGCGTTACCGGACTGTTTGATTATTGGG | | | |
| GGCAGGGGACAACTCTGACTGTTTCCTCCgatatctacatctgggcgccc | | | |
| ttggccgggacttgtggggtccttctcctgtcactggttatcaccctttactgcaaacgg | | | |
| ggcagaaagaaactcctgtatatattcaaacaaccatttatgagaccagtacaaact | | | |
| actcaagaggaagatggctgtagctgccgatttccagaagaagaagaaggaggatg | | | |
| tgaactgagagtgaagttcagcaggagcgcagacgcccccgcgtacaagcagggcc | | | |
| agaaccagctctataacgagctcaatctaggacgaagagaggagtacgatgttttgg | | | |
| acaagagacgtggccgggaccctgagatggggggaaagccgagaaggaagaaccc | | | |
| tcaggaaggcctgtacaatgaactgcagaaagataagatggcggaggcctacagtg | | | |
| agattgggatgaaaggcgagcgccggaggggcaaggggcacgatggcctttaccag | | | |
| ggtctcagtacagccaccaaggacacctacgacgcccttcacatgcaggccctgccc | | | |
| cctcgc | | | |
| DAVVTQESALTSSPGETVTLTCRSSTGAVTTSNYASWVQEK | 85 | CAR-GCN4 | Amino |
| PDHLFTGLIGGTNNRAPGVPARFSGSLIGDKAALTITGAQT | | (CD8 | Acid |
| EDEAIYFCVLWYSDHWVFGGGTKLTVLGGGGGSGGGGSGGG | | hinge) | |
| GSGGGGSDVQLQESGPGLVAPSQSLSITCTVSGFLLTDYGV | | | |
| NWVRQSPGKGLEWLGVIWGDGITDYNSALKSRLSVTKDNSK | | | |
| SQVFLKMNSLQSGDSARYYCVTGLFDYWGQGTTLTVSSTTT | | | |
| PAPRPPTPAPTIASQPLSLRPEACRPAAGGAVHTRGLDFAC | | | |
| DIYIWAPLAGTCGVLLLSLVITLYCKRGRKKLLYIFKQPFM | | | |
| RPVQTTQEEDGCSCRFPEEEEGGCELRVKFSRSADAPAYKQ | | | |
| GQNQLYNELNLGRREEYDVLDKRRGRDPEMGGKPRRKNPQE | | | |
| GLYNELQKDKMAEAYSEIGMKGERRRGKGHDGLYQGLSTAT | | | |
| KDTYDALHMQALPPR | | | |
| DAVVTQESALTSSPGETVTLTCRSSTGAVTTSNYASWVQEK | 86 | CAR-GCN4 | Amino |
| PDHLFTGLIGGTNNRAPGVPARFSGSLIGDKAALTITGAQT | | (IgG4m | Acid |
| EDEAIYFCVLWYSDHWVFGGGTKLTVLGGGGGSGGGGSGGG | | hinge) | |
| GSGGGGSDVQLQESGPGLVAPSQSLSITCTVSGFLLTDYGV | | | |
| NWVRQSPGKGLEWLGVIWGDGITDYNSALKSRLSVTKDNSK | | | |
| SQVFLKMNSLQSGDSARYYCVTGLFDYWGQGTTLTVSSESK | | | |
| YGPPCPPCPDIYIWAPLAGTCGVLLLSLVITLYCKRGRKKL | | | |
| LYIFKQPFMRPVQTTQEEDGCSCRFPEEEEGGCELRVKFSR | | | |
| SADAPAYKQGQNQLYNELNLGRREEYDVLDKRRGRDPEMGG | | | |
| KPRRKNPQEGLYNELQKDKMAEAYSEIGMKGERRRGKGHDG | | | |
| LYQGLSTATKDTYDALHMQALPPR | | | |
| GGGGS | 93 | GGGGS | Amino |
| | | linker | Acid |
| GGGS | 94 | GGGS | Amino |
| | | linker | Acid |
| GGS | 95 | GGS linker | Amino |
| | | | Acid |
| GS | 96 | GS linker | Amino |
| | | | Acid |
| (XₘS)ₙ, n is at least 1, m is at least 1 | 97 | XS linker | Amino |
| and X is an amino acid | | | Acid |
| LVGEAAAKEAAAKA | 98 | rigid | Amino |
| | | switch | Acid |
| | | fusion/grafting | |
| | | linker 3 | |
| AEAAAKEAAAKA | 99 | rigid | Amino |
| | | switch | Acid |
| | | fusion/grafting | |
| | | linker 4 | |
| EAAAKEAAAKEAAAKA | 100 | rigid | Amino |
| | | switch | Acid |
| | | fusion/grafting | |
| | | linker 4a | |
| EGKSSGSGSESKST | 101 | flexible | Amino |
| | | switch | Acid |
| | | fusion/grafting | |
| | | linker- | |
| | | prophetic | |
| GSAGSAAGSGEF | 102 | rigid | Amino |
| | | switch | Acid |
| | | fusion/grafting | |
| | | linker 5 | |
| APAPAPAPAPAPAP | 103 | prolyl | Amino |
| | | switch | Acid |
| | | fusion/grafting | |
| | | linker- | |
| | | prophetic | |
| tcgagaagcttgccaccatgggtgtccctacccagctcctg | 104 | GCN4-CD28- | DNA |
| ggactgctcctgctgtggatcaccgacgccatctgcGACGC | | CD3z(1-3) | |
| CGTTGTGACCCAGGAATCCGCTCTGACCTCTTCTCCAGGCG | | | |
| AAACCGTGACTCTGACTTGCCGTAGTAGCACCGGGGCTGTG | | | |
| ACCACATCTAACTATGCCAGTTGGGTCCAGGAAAAACCGGA | | | |
| TCACCTGTTTACTGGCCTGATTGGCGGCACCAACAATCGCG | | | |
| CACCGGGTGTGCCCGCTCGTTTCAGCGGTTCCCTGATTGGG | | | |
| GACAAGGCAGCACTGACTATCACCGGCGCCCAGACCGAAGA | | | |
| TGAGGCGATCTATTTTTGCGTCCTGTGGTACAGCGACCATT | | | |
| GGGTGTTCGGGGGAGGCACCAAACTGACAGTGCTGGGCGGA | | | |
| GGAGGAGGTTCAGGAGGAGGAGGTAGCGGGGGAGGCGGTTC | | | |
| CGGGGGAGGCGGTTCTGATGTGCAGCTGCAAGAATCCGGGC | | | |
| CAGGACTGGTTGCGCCTTCTCAGAGTCTGTCAATTACATGT | | | |
| ACTGTTAGTGGCTTTCTGCTGACCGACTATGGTGTGAACTG | | | |
| GGTTCGTCAGAGCCCAGGCAAGGGTCTGGAGTGGCTGGGAG | | | |
| TGATTTGGGGGGATGGAATCACAGACTACAATAGCGCACTG | | | |
| AAATCTCGGCTGAGTGTTACCAAAGATAACAGCAAGTCCCA | | | |
| GGTCTTCCTGAAGATGAACAGCCTGCAAAGCGGCGACTCCG | | | |
| CTCGCTATTACTGCGTTACCGGACTGTTTGATTATTGGGGG | | | |
| CAGGGGACAACTCTGACTGTTTCCTCCatcgagttcatgta | | | |
| cccccctccctacctggacaacgagagaagcaacggcacca | | | |
| tcatccacatcaaagaaaagcacctgtgccacacccagagc | | | |
| agccccaagctgttctgggccctggtggtggtggccggcgt | | | |
| gctgttctgttacggcctgctggtcacagtggccctgtgcg | | | |
| tgatctggaccaacagcagaagaaacagaggcggccagagc | | | |
| gactacatgaacatgacccccagaaggccaggcctgaccag | | | |
| aaagccctaccagccctacgcccctgccagagacttcgccg | | | |
| cctacagacccagagccaagttcagcagatccgccgagaca | | | |
| gccgccaacctgcaggatcccaaccagctgttcaacgagct | | | |
| gaacctgggcagacgggaggaattcgacgtgctggaaaaga | | | |
| agagagccagggaccccgagatgggcggcaagcagcagaga | | | |
| agaagaaaccctcaggaaggcgtctacaacgccctgcagaa | | | |
| agacaagatggccgaggcctacagcgagatcggcaccaagg | | | |
| gcgagagaagaaggggcaagggccacgatggcctgttccag | | | |
| ggcctgtccaccgccaccaaggacaccttcgacgccctgca | | | |
| catgcagaccctggcccccagatgagtcgacggtaccgcgg | | | |
| gcccgggatccgataaaataaaagattttatttagtctcca | | | |
| gaaaaaggggggaatgaaagaccccacctgtaggtttggca | | | |
| agctagcttaagtaacgccattttgcaaggcatggaaaata | | | |
| cataactgagaatagagaagttcagatcaaggttaggaaca | | | |
| gagagacagcagaatatgggccaaacaggatatctgtggta | | | |
| agcagttcctgccccggctcagggccaagaacagatggtcc | | | |
| ccagatgcggtcccgccctcagcagtttctagagaaccatc | | | |
| agatgtttccagggtgccccaaggacctgaaaatgaccctg | | | |
| tgccttatttgaactaaccaatcagttcgcttctcgcttct | | | |
| gttcgcgcgcttctgctccccgagctcaataaaagagccca | | | |
| caacccctcactcggcgcgccagtcctccgatagactgcgt | | | |
| cgcccgggtacccgtgtatccaataaaccctcttgcagttg | | | |
| catccgacttgtggtctcgctgttccttgggagggtctcct | | | |
| ctgagtgattgactacccgtcagcgggggtctttcatgggt | | | |
| aacagtttcttgaagttggagaacaacattctgagggtagg | | | |
| agtcgaatattaagtaatcctgactcaattagccactgttt | | | |
| tgaatccacatactccaatactcctgaaatccatcgatgga | | | |
| gttcattatggacagcgcagaaagagctggggagaattgtg | | | |
| aaattgttatccgctcacaattccacacaacatacgagccg | | | |
| gaagcataaagtgtaaagcctggggtgcctaatgagtgagc | | | |
| taactcacattaattgcgttgcgctcactgcccgctttcca | | | |
| gtcgggaaacctgtcgtgccagctgcattaatgaatcggcc | | | |
| aacgcgcggggagaggcggtttgcgtattgggcgctcttcc | | | |
| gcttcctcgctcactgactcgctgcgctcggtcgttcggct | | | |
| gcggcgagcggtatcagctcactcaaaggcggtaatacggt | | | |
| tatccacagaatcaggggataacgcaggaaagaacatgtga | | | |
| gcaaaaggccagcaaaaggccaggaaccgtaaaaaggccgc | | | |
| gttgctggcgtttttccataggctccgcccccctgacgagc | | | |
| atcacaaaaatcgacgctcaagtcagaggtggcgaaacccg | | | |
| acaggactataaagataccaggcgtttccccctggaagctc | | | |
| cctcgtgcgctctcctgttccgaccctgccgcttaccggat | | | |
| acctgtccgcctttctcccttcgggaagcgtggcgctttct | | | |
| catagctcacgctgtaggtatctcagttcggtgtaggtcgt | | | |
| tcgctccaagctgggctgtgtgcacgaaccccccgttcagc | | | |
| ccgaccgctgcgccttatccggtaactatcgtcttgagtcc | | | |
| aacccggtaagacacgacttatcgccactggcagcagccac | | | |
| tggtaacaggattagcagagcgaggtatgtaggcggtgcta | | | |
| cagagttcttgaagtggtggcctaactacggctacactaga | | | |
| aggacagtatttggtatctgcgctctgctgaagccagttac | | | |
| cttcggaaaaagagttggtagctcttgatccggcaaacaaa | | | |
| ccaccgctggtagcggtggtttttttgtttgcaagcagcag | | | |
| attacgcgcagaaaaaaaggatctcaagaagatcctttgat | | | |
| cttttctacggggtctgacgctcagtggaacgaaaactcac | | | |
| gttaagggattttggtcatgagattatcaaaaaggatcttc | | | |
| acctagatccttttaaattaaaaatgaagttttaaatcaat | | | |
| ctaaagtatatatgagtaaacttggtctgacagttaccaat | | | |
| gcttaatcagtgaggcacctatctcagcgatctgtctattt | | | |
| cgttcatccatagttgcctgactccccgtcgtgtagataac | | | |
| tacgatacgggagggcttaccatctggccccagtgctgcaa | | | |
| tgataccgcgagacccacgctcaccggctccagatttatca | | | |
| gcaataaaccagccagccggaagggccgagcgcagaagtgg | | | |
| tcctgcaactttatccgcctccatccagtctattaattgtt | | | |
| gccgggaagctagagtaagtagttcgccagttaatagtttg | | | |
| cgcaacgttgttgccattgctacaggcatcgtggtgtcacg | | | |
| ctcgtcgtttggtatggcttcattcagctccggttcccaac | | | |
| gatcaaggcgagttacatgatcccccatgttgtgcaaaaaa | | | |
| gcggttagctccttcggtcctccgatcgttgtcagaagtaa | | | |
| gttggccgcagtgttatcactcatggttatggcagcactgc | | | |
| ataattctcttactgtcatgccatccgtaagatgcttttct | | | |
| gtgactggtgagtactcaaccaagtcattctgagaatagtg | | | |
| tatgcggcgaccgagttgctcttgcccggcgtcaatacggg | | | |
| ataataccgcgccacatagcagaactttaaaagtgctcatc | | | |
| attggaaaacgttcttcggggcgaaaactctcaaggatctt | | | |
| accgctgttgagatccagttcgatgtaacccactcgtgcac | | | |
| ccaactgatcttcagcatcttttactttcaccagcgtttct | | | |
| gggtgagcaaaaacaggaaggcaaaatgccgcaaaaaaggg | | | |
| aataagggcgacacggaaatgttgaatactcatactcttcc | | | |
| tttttcaatattattgaagcatttatcagggttattgtctc | | | |
| atgagcggatacatatttgaatgtatttagaaaaataaaca | | | |
| aataggggttccgcgcacatttccccgaaaagtgccacctg | | | |
| acgtctaagaaaccattattatcatgacattaacctataaa | | | |
| aataggcgtatcacgaggccctttcgtctcgcgcgtttcgg | | | |
| tgatgacggtgaaaacctctgacacatgcagctcccggaga | | | |
| cggtcacagcttgtctgtaagcggatgccgggagcagacaa | | | |
| gcccgtcagggcgcgtcagcgggtgttggcgggtgtcgggg | | | |
| ctggcttaactatgcggcatcagagcagattgtactgagag | | | |
| tgcaccatatgcggtgtgaaataccgcacagatgcgtaagg | | | |
| agaaaataccgcatcaggcgccattcgccattcaggctgcg | | | |
| caactgttgggaagggcgatcggtgcgggcctcttcgctat | | | |
| tacgccagctggcgaaagggggatgtgctgcaaggcgatta | | | |
| agttgggtaacgccagggttttcccagtcacgacgttgtaa | | | |
| aacgacggccagtgccacgctctcccttatgcgactcctgc | | | |
| attaggaagcagcccagtagtaggttgaggccgttgagcac | | | |
| cgccgccgcaaggaatggtgcatgcaaggagatggcgccca | | | |
| acagtcccccggccacggggcctgccaccatacccacgccg | | | |
| aaacaagcgctcatgagcccgaagtggcgagcccgatcttc | | | |
| cccatcggtgatgtcggcgatataggcgccagcaaccgcac | | | |
| ctgtggcgccggtgatgccggccacgatgcgtccggcgtag | | | |
| aggcgatttaaagacaggatatcagtggtccaggctctagt | | | |
| tttgactcaacaatatcaccagctgaagcctatagagtacg | | | |
| agccatagataaaataaaagattttatttagtctccagaaa | | | |
| aaggggggaatgaaagaccccacctgtaggtttggcaagct | | | |
| agcttaagtaacgccattttgcaaggcatggaaaatacata | | | |
| actgagaatagagaagttcagatcaaggttaggaacagaga | | | |
| gacagcagaatatgggccaaacaggatatctgtggtaagca | | | |
| gttcctgccccggctcagggccaagaacagatggtccccag | | | |
| atgcggtcccgccctcagcagtttctagagaaccatcagat | | | |
| gtttccagggtgccccaaggacctgaaaatgaccctgtgcc | | | |
| ttatttgaactaaccaatcagttcgcttctcgcttctgttc | | | |
| gcgcgcttctgctccccgagctcaataaaagagcccacaac | | | |
| ccctcactcggcgcgccagtcctccgatagactgcgtcgcc | | | |
| cgggtacccgtattcccaataaagcctcttgctgtttgcat | | | |
| ccgaatcgtggactcgctgatccttgggagggtctcctcag | | | |
| attgattgactgcccacctcgggggtctttcatttggaggt | | | |
| tccaccgagatttggagacccctgcctagggaccaccgacc | | | |
| cccccgccgggaggtaagctggccagcggtcgtttcgtgtc | | | |
| tgtctctgtctttgtgcgtgtttgtgccggcatctaatgtt | | | |
| tgcgcctgcgtctgtactagttagctaactagctctgtatc | | | |
| tggcggacccgtggtggaactgacgagttcggaacacccgg | | | |
| ccgcaaccctgggagacgtcccagggacttcgggggccgtt | | | |
| tttgtggcccgacctgagtccaaaaatcccgatcgttttgg | | | |
| actctttggtgcaccccccttagaggagggatatgtggttc | | | |
| tggtaggagacgagaacctaaaacagttcccgcctccgtct | | | |
| gaatttttgctttcggtttgggaccgaagccgcgccgcgcg | | | |
| tcttgtctgctgcagcatcgttctgtgttgtctctgtctga | | | |
| ctgtgtttctgtatttgtctgagaatatgggcccgggctag | | | |
| cctgttaccactcccttaagtttgaccttaggtcactggaa | | | |
| agatgtcgagcggatcgctcacaaccagtcggtagatgtca | | | |
| agaagagacgttgggttaccttctgctctgcagaatggcca | | | |
| acctttaacgtcggatggccgcgagacggcacctttaaccg | | | |
| agacctcatcacccaggttaagatcaaggtcttttcacctg | | | |
| gcccgcatggacacccagaccaggtcccctacatcgtgacc | | | |
| tgggaagccttggcttttgacccccctccctgggtcaagcc | | | |
| ctttgtacaccctaagcctccgcctcctcttcctccatccg | | | |
| ccccgtctctcccccttgaacctcctcgttcgaccccgcct | | | |
| cgatcctccctttatccagccctcactccttctctaggcgc | | | |
| ccccatatggccatatgagatcttatatggggcacccccgc | | | |
| cccttgtaaacttccctgaccctgacatgacaagagttact | | | |
| aacagcccctctctccaagctcacttacaggctctctactt | | | |
| agtccagcacgaagtctggagacctctggcggcagcctacc | | | |
| aagaacaactggaccgaccggtggtacctcacccttaccga | | | |
| gtcggcgacacagtgtgggtccgccgacaccagactaagaa | | | |
| cctagaacctcgctggaaaggaccttacacagtcctgctga | | | |
| ccacccccaccgccctcaaagtagacggcatcgcagcttgg | | | |
| atacacgccgcccacgtgaaggctgccgaccccgggggtgg | | | |
| accatcctctagactgc | | | |
| AYHLENEVARLKKL | 105 | GCN4 | Amino |
| | | epitope | Acid |
| | | alanine | |
| | | mutant 1 | |
| AAHLENEVARLKKL | 106 | GCN4 | Amino |
| | | epitope | Acid |
| | | alanine | |
| | | mutant 2 | |
| AAALENEVARLKKL | 107 | GCN4 | Amino |
| | | epitope | Acid |
| | | alanine | |
| | | mutant 3 | |
| AAAAENEVARLKKL | 108 | GCN4 | Amino |
| | | epitope | Acid |
| | | alanine | |
| | | mutant 4 | |
| NYHLENEVARLKKA | 109 | GCN4 | Amino |
| | | epitope | Acid |
| | | alanine | |
| | | mutant 5 | |
| NYHLENEVARLKAA | 110 | GCN4 | Amino |
| | | epitope | Acid |
| | | alanine | |
| | | mutant 6 | |
| NYHLENEVARLAAA | 111 | GCN4 | Amino |
| | | epitope | Acid |
| | | alanine | |
| | | mutant 7 | |
| NYHLENEVARAAAA | 112 | GCN4 | Amino |
| | | epitope | Acid |
| | | alanine | |
| | | mutant 8 | |
| LLPKNYHLENEVARLKKL | 113 | GCN4 | Amino |
| | | epitope | Acid |
| | | extended 1 | |
| DLPQKYHLENEVARLKKL | 114 | GCN4 | Amino |
| | | epitope | Acid |
| | | extended 2 | |
| LVGEAAAKEAAAKA | 116 | Heavy | Amino |
| | | chain | Acid |
| | | linker | |
| | | HCNT3 | |
| AEAAAKEAAAKA | 117 | Heavy | Amino |
| | | chain | Acid |
| | | linker | |
| | | HCNT4 | |
| ggcgggggcggaagt | 118 | NT1 Flex | |
| GGTGGGGGAGGGAGCGGTGGAGGTGGTTCT | 119 | NT2 Flex2 | |
| AEAAAKEAAAKA | 120 | NT4 Rigid | Amino |
| | | | Acid |
| GCGGAAGCAGCCGCCAAAGAGGCTGCCGCGAAAGCG | 121 | NT4 Rigid | |
| GSAGSAAGSGEF | 122 | NT5: | Amino |
| | | Flexible | Acid |
| GGTTCCGCCGGTTCCGCAGCCGGCTCCGGAGAGTTC | 123 | NT5: | |
| | | Flexible | |
| KESGSVSSEQLAQFRSLD | 124 | NT7: Flexible, | Amino |
| | | from scFv | Acid |
| AAGGAATCCGGGAGCGTGTCTTCCGAACAGCTGGCTCAGTT | 125 | NT7: Flexible, | |
| CCGCAGCCTGGAT | | from scFv | |
| EGKSSGSGSESKST | 126 | NT8: | Amino |
| | | Flexible | Acid |
| | | from scFv | |
| GAGGGGAAGTCCTCCGGCTCTGGGTCCGAGTCCAAGTCCACA | 127 | NT8: | |
| | | Flexible | |
| | | from scFv | |
| APAPAPAPAPAPAP | 128 | NT9: | |
| | | Prolyl | |
| GCTCCCGCCCCTGCCCCAGCTCCTGCCCCCGCACCCGCACCC | 129 | NT9: | |
| | | Prolyl | |
| GG | 130 | NT10: | Amino |
| | | Short | Acid |
| ggcggg | 131 | NT10: | |
| | | Short | |
| GSTSGSGKPGSGEGSTKG | 132 | Whitlow | Amino |
| | | peptide | Acid |
| | | linker | |
| | | (scFv) | |
| GSTSGSGKPGSGEGSTKG | 133 | Cooper LIN | Amino |
| | | (2003) in | Acid |
| | | FMC63 CAR | |
| ASTKGPSVFPLAP | 134 | LL-Heavy | Amino |
| | | | Acid |
| TVAAPSVFIFPP | 135 | LL-Light | Amino |
| | | | Acid |
| ASTKGP | 136 | SS-Heavy | Amino |
| | | | Acid |
| TVAAP | 137 | SS-Light | Amino |
| | | | Acid |
| NYHLENEVARLKKL | 138 | GCN4 in | Amino |
| | | LCNT1 | Acid |
| LLPKNYHLENEVARLKKL | 139 | GCN4 in | Amino |
| | | LCNT1-A | Acid |
| DLPKQYHLENEVARLKKL | 140 | GCN4 in | Amino |
| | | LCNT1-B | Acid |
| LLPKNYHLENEVARLK | 141 | GCN4 in | Amino |
| | | LCNT1-C | Acid |
| LPKNYHLENEVARLK | 142 | GCN4 in | Amino |
| | | LCNT1-D | Acid |
| PKNYHLENEVARLK | 143 | GCN4 in | Amino |
| | | LCNT1-E | Acid |
| KNYHLENEVARLK | 144 | GCN4 in | Amino |
| | | LCNT1-F | Acid |
| NYHLENEVARLK | 145 | GCN4 in | Amino |
| | | LCNT1-G | Acid |
| NYHLENEVARLKA | 146 | GCN4 in | Amino |
| | | LCNT1-H | Acid |
| LLPKNYHLENEVARLKAL | 147 | GCN4 in | Amino |
| | | LCNT1-I | Acid |
| KNYHLENEVARLKAL | 148 | GCN4 in | Amino |
| | | LCNT1-J | Acid |
| NYHLENEVARLKAL | 149 | GCN4 in | Amino |
| | | LCNT1-K | Acid |
| NYHLENEVARLKGL | 150 | GCN4 in | Amino |
| | | LCNT1-L | Acid |
| NYHLENEVARLKAA | 151 | GCN4 in | Amino |
| | | LCNT1-M | Acid |
| KNYHLENEVARLKGL | 152 | GCN4 in | Amino |
| | | LCNT1-N | Acid |
| KNYHLENEVARLKAA | 153 | GCN4 in | Amino |
| | | LCNT1-O | Acid |
| KNYHLENEVARLKKL | 154 | GCN4 | Amino |
| | | variant | Acid |
| KNYHLENEVARLKAL | 155 | GCN4 | Amino |
| | | variant | Acid |
| KNYHLENEVARLKGL | 156 | GCN4 | Amino |
| | | variant | Acid |
| KNYHLENEVARLKAA | 157 | GCN4 | Amino |
| | | variant | Acid |
| KNYHLENEVARLKGG | 158 | GCN4 | Amino |
| | | variant | Acid |
| NYHLENEVARLKKL | 159 | GCN4 | Amino |
| | | variant | Acid |
| NYHLENEVARLKAL | 160 | GCN4 | Amino |
| | | variant | Acid |
| NYHLENEVARLKGL | 161 | GCN4 | Amino |
| | | variant | Acid |
| NYHLENEVARLKAA | 162 | GCN4 | Amino |
| | | variant | Acid |
| NYHLENEVARLKGG | 163 | GCN4 | Amino |
| | | variant | Acid |
| EAAAKEAAAKEAAAKA | 164 | rigid | Amino |
| | | linker | Acid |
| TTTPAPRPPTPAPTIASQPLSLRPEACRPAAGGAVHTRGLD | 165 | CD8 Hinge | Amino |
| FACD | | | Acid |
| D | 166 | | Amino |
| | | | Acid |
| ESKYGPPCPSCP | 167 | IgG4 | Amino |
| | | Hinge | Acid |
| ESKYGPPCPPCP | 168 | IgG4m | Amino |
| | | Hinge | Acid |
| X1NYHLENEVARLKX2X3 | 269 | Structure I | Amino |
| | | | Acid |
| IEVMYPPPYLDNEKSNGTIIHVKGKHLCPSPLFPGPSKP | 421 | CD28 Hinge | Amino |
| | | | Acid |

### EXAMPLES

### Example 1

### Design of Humanized CAR-EC Switches

### Background

[0541] The anti-CD19 murine clone FMC63 was used as proof of concept in preliminary studies as a switch for the switchable CAR-EC program. The FMC63 clone was originally described in 1991 by H. Zola and coworkers (1) and is used in the most well studied conventional CAR-T cell from Carl June and coworkers (2-4). To decrease the potential for immunogenicity in human application, the murine framework regions of the FMC63 antibody were partially replaced with human sequences.

### General Process:

[0542] Briefly, the humanization process was carried out as follows: The murine FMC63 sequences for variable light (VL) and variable heavy (VH) domains were submitted to the IgBLAST program available on the NCBI website at the world wide web address: ncbi.nlm.nih.gov/igblast/ (incorporated herein by reference in its entirety); see, also, Ye, et al., Nucleic Acids Res. 2013 July; 41(Web Server issue), incorporated herein by reference in its entirety. Each murine sequence was compared to murine germline sequences and then compared to human germline sequences.

### Heavy Chain Analysis

[0543] Murine FMC63 VH was aligned with human germline IGHV4-59 (Table 4). The complimentary determining regions (CDR) are generally defined using AbYsis from AbM (available at the world wide web address bioinf.org.uk/abs/, incorporated herein by reference in its entirety); AbM numbering will be used in this report. Of the numerous framework differences between murine FMC VH and human IGHV4-59, we identified nine that may influence the conformation of the VH domain and its CDRs and that we decided to investigate for potential impact.

[0544] Design hFMCH2 (Table 4) has a complete human IGHV4-59 (“h4-59_01”) framework with seven alterations—murine residues at positions 20, 48, 67, 71, 78, 82, and 82c.

[0545] Design hFMCH3 (Table 4) has Thr73 changed to mouse Asn73 in addition to all the changes in hFMCH2.

[0546] An additional change at position 94 was also investigated: Design hFMCH4a has the position 94 change in addition to all changes included in hFMCH2; design hFMCH4b has the position 94 change in addition to all changes included in hFMCH3.

[0547] In addition, the N-terminal residue was mutated to Glu instead of Gln in various constructs as this removes pyroGln formation. Alignments of the Heavy Chain sequences of various exemplary constructs are provided in FIG. 1A and FIG. 1B.

TABLE 4
Heavy Chain Sequences (see also, FIG. 1A and FIG. 1B)

| SEQ | | |
|---|---|---|
| ID | | |
| NO | NAME | SEQUENCE |
| 1 | h4-59_01 | QVQLQESGPGLVKPSETLSLTCTVSGGSISSYYWSWIRQPPGKGLEWI |
| | | GYIYYSGSTNYNPSLKSRVTISVDTSKNQFSLKLSSVTAADTAVYYCA |
| | | R |
| 2 | hFMCH1 | QVQLQESGPGLVKPSETLSLTCTVSGVSLPDYGVSWIRQPPGKGLEWI |
| | | GVIWGSETTYYNPSLKSRVTISVDTSKNQFSLKLSSVTAADTAVYYCA |
| | | RHYYYGGSYAMDYWGQGTLVTVSS |
| 3 | hFMCH2 | QVQLQESGPGLVKPSETLSVTCTVSGVSLPDYGVSWIRQPPGKGLEWL |
| | | GVIWGSETTYYNPSLKSRLTISKDTSKNQVSLKMSSLTAADTAVYYCA |
| | | RHYYYGGSYAMDYWGQGTLVTVSS |
| 4 | hFMCH3 | QVQLQESGPGLVKPSETLSVTCTVSGVSLPDYGVSWIRQPPGKGLEWL |
| | | GVIWGSETTYYNPSLKSRLTISKDNSKNQVSLKMSSLTAADTAVYYCA |
| | | RHYYYGGSYAMDYWGQGTLVTVSS |
| 5 | hFMCH4a | QVQLQESGPGLVKPSETLSVTCTVSGVSLPDYGVSWIRQPPGKGLEWL |
| | | GVIWGSETTYYNPSLKSRLTISKDTSKNQVSLKMSSLTAADTAVYYCA |
| | | KHYYYGGSYAMDYWGQGTLVTVSS |
| 6 | hFMCH4b | QVQLQESGPGLVKPSETLSVTCTVSGVSLPDYGVSWIRQPPGKGLEWL |
| | | GVIWGSETTYYNPSLKSRLTISKDNSKNQVSLKMSSLTAADTAVYYCA |
| | | KHYYYGGSYAMDYWGQGTLVTVSS |
| 7 | hFMCH4c | QVQLQESGPGLVKPSETLSVTCTVSGVSLPDYGVSWIRQPPGKGLEWL |
| | | GVIWGSETTYYNSALKSRLTISKDNSKNQVSLKMSSLTAADTAVYYCA |
| | | KHYYYGGSYAMDYWGQGTLVTVSS |
| 8 | hFMCH4z | QVQLQESGPGLVKPSETLSVTCTVSGVSLPDYGVSWIRQPPGKGLEWL |
| | | GVIWGSETTYYNSSLKSRLTISKDNSKNQVSLKMSSLTAADTAVYYCA |
| | | KHYYYGGSYAMDYWGQGTLVTVSS |
| 9 | hFMCH4b-x | QVQLQESGPGLVKPSETLSLTCTVSGVSLPDYGVSWIRQPPGKGLEWI |
| | | GVIWGSETTYYNPSLKSRVTISKDNSKNQFSLKLSSVTAADTAVYYCA |
| | | KHYYYGGSYAMDYWGQGTLVTVSS |
| 10 | hFMCH4c-x | QVQLQESGPGLVKPSETLSLTCTVSGVSLPDYGVSWIRQPPGKGLEWI |
| | | GVIWGSETTYYNSALKSRVTISKDNSKNQFSLKLSSVTAADTAVYYCA |
| | | KHYYYGGSYAMDYWGQGTLVTVSS |
| 11 | hFMCH4c-20L-E | EVQLQESGPGLVKPSETLSLTCTVSGVSLPDYGVSWIRQPPGKGLEWL |
| | | GVIWGSETTYYNSALKSRLTISKDNSKNQVSLKMSSLTAADTAVYYCA |
| | | KHYYYGGSYAMDYWGQGTLVTVSS |
| 12 | hFMCH4b-E | EVQLQESGPGLVKPSSETLSVTCTVSGVSLPDYGVSWIRQPPGKGLEWL |
| | | GVIWGSETTYYNPSLKSRLTISKDNSKNQVSLKMSSLTAADTAVYYCA |
| | | KHYYYGGSYAMDYWGQGTLVTVSS |
| 13 | hFMCH4c-E | EVQLQESGPGLVKPSSETLSVTCTVSGVSLPDYGVSWIRQPPGKGLEWL |
| | | GVIWGSETTYYNSALKSRLTISKDNSKNQVSLKMSSLTAADTAVYYCA |
| | | KHYYYGGSYAMDYWGQGTLVTVSS |
| 14 | hFMCH4b-20L-E | EVQLQESGPGLVKPSETLSLTCTVSGVSLPDYGVSWIRQPPGKGLEWL |
| | | GVIWGSETTYYNPSLKSRLTISKDNSKNQVSLKMSSLTAADTAVYYCA |
| | | KHYYYGGSYAMDYWGQGTLVTVSS |
| 15 | mFMC63H | EVKLQESGPGLVAPSQSLSVTCTVSGVSLPDYGVSWIRQPPRKGLEWL |
| | | GVIWGSETTYYNSALKSRLTIIKDNSKSQVFLKMNSLQTDDTAIYYCA |
| | | KHYYYGGSYAMDYWGQGTSVTVSS |

### Light Chain Analysis

[0548] Murine FMC VL was aligned with human germline IGKV1-39 (Table 5). CDR definitions used are those from AbM (available at the world wide web address bioinf.org.uk/abs/, incorporated herein by reference in its entirety). Of the numerous framework differences between murine FMC VL and human IGKV1-39, only position 71 likely would influence the conformation of the VL domain and its CDRs.

[0549] Design hFMCL2 includes the Phe71Tyr change.

[0550] FMC CDR-L3 has an Asn residue (Asn92) that has low propensity for deamidation, therefore this residue could be changed to alanine. Alignments of the Light Chain sequences are provided in FIG. 2A and FIG. 2B.

TABLE 5
Light Chain Sequences (see also, FIG. 2A and FIG. 2B)

| SEQ | | |
|---|---|---|
| ID | | |
| NO | NAME | SEQUENCE |
| 16 | IGKV1-39 | DIQMTQSPSSLSASVGDRVTITCRASQSISSYLNWYQQKPGKAPKLLI |
| | | YAASSLQSGVPSRFSGSGSGTDFTLTISSLQPEDFATYYCQQSYSTPP |
| 17 | hFMCL1 | DIQMTQSPSSLSASVGDRVTITCRASQDISKYLNWYQQKPGKAPKLLI |
| | | YHTSRLHSGVPSRFSGSGSGTDFTLTISSLQPEDFATYYCQQGNTLPY |
| | | TFGQGTKLEIK |
| 18 | hFMCL2 | DIQMTQSPSSLSASVGDRVTITCRASQDISKYLNWYQQKPGKAPKLLI |
| | | YHTSRLHSGVPSRFSGSGSGTDYTLTISSLQPEDFATYYCQQGATLPY |
| | | TFGQGTKLEIK |
| 19 | hFMCL2a | DIQMTQSPSSLSASVGDRVTITCRASQDISKYLNWYQQKPGKAVKLLI |
| | | YHTSRLHSGVPSRFSGSGSGTDYTLTISSLQPEDFATYYCQQGATLPY |
| | | TFGQGTKLEIK |
| 20 | hFMCL2b | DIQMTQSPSSLSASVGDRVTITCRASQDISKYLNWYQQKPGKAVKLLI |
| | | YHTSRLHSGVPSRFSGSGSGTDYTLTISSLQPEDFATYFCQQGATLPY |
| | | TFGQGTKLEIK |
| 21 | hFMCL2b-1 | DIQMTQSPSSLSASVGDRVTITCRASQDISKYLNWYQQKPGKAPKLLI |
| | | YHTSRLHSGVPSRFSGSGSGTDYTLTISSLQPEDFATYFCQQGATLPY |
| | | TFGQGTKLEIK |
| 22 | hFMCL2b(V44L) | DIQMTQSPSSLSASVGDRVTITCRASQDISKYLNWYQQKPGKALKLLI |
| | | YHTSRLHSGVPSRFSGSGSGTDYTLTISSLQPEDFATYFCQQGATLPY |
| | | TFGQGTKLEIK |
| 23 | hFMCL2b(A92N) | DIQMTQSPSSLSASVGDRVTITCRASQDISKYLNWYQQKPGKAVKLLI |
| | | YHTSRLHSGVPSRFSGSGSGTDYTLTISSLQPEDFATYFCQQGNTLPY |
| | | TFGQGTKLEIK |
| 24 | hFMCL2c | DIQMTQSPSSLSASVGDRVTITCRASQDISKYLNWYQQKPGKAVKLLI |
| | | YHTSRLHSGVPSRFSGSGSGTDYTLTISSLQPEDFATYFCQQGATLPY |
| | | TFGQGTKLEIK |
| 25 | mFMC63L | DIQMTQTTSSLSASLGDRVTISCRASQDISKYLNWYQQKPDGTVKLLI |
| | | YHTSRLHSGVPSRFSGSGSGTDYSLTISNLEQEDIATYFCQQGNTLPY |
| | | TFGGGTKLEIK |

### Switch Production

[0551] CAR-EC switches containing the above humanized “FMC63 VH” and/or “FMC63 VL” sequences were produced by genetically fusing a GCN4 peptide to the N terminus of the light chain (LCNT) connected with a GGGGS linker as described in Rodgers D T, et al., PNAS, 2016; 113(4):E459-68. doi: 10.1073/pnas.1524155113. PubMed PMID: 26759369; PMCID: PMC4743815 (incorporated herein by reference in its entirety). In these non-limiting examples, a GCN4 peptide comprising the sequence NYHLENEVARLKKL (SEQ ID NO: 26) was used. Thus, the LCNT constructs comprised the following structure: NYHLENEVARLKKL-[GGGGS]-[FMC63 VL sequence or humanized variants thereof].

[0552] (5). Switches were expressed with one heavy chain and one light chain (e.g., FMC63 VL or a GNC4 peptide-fused LCNT variant) and purified to homogeneity as described in Example 2.

[0553] Table 6 shows 21 non-limiting examples of humanized CAR-EC switch variants. The heavy chain/light chain combinations used to make these switches are shown in the rows of Table 6. For example, the CAR-EC switch labeled below as combination 2 included the FMC63 humanized variable heavy chain H2 (i.e., hFMCH2 shown in FIG. 1A and FIG. 1B) and the humanized variable light chain L2 (i.e., hFMCL2 shown in FIG. 2A and FIG. 2B). As discussed above, all of the light chains included in the CAR-EC switches exemplified in this example further comprised the GCN4 peptide fusion at their N-terminus, linked by the GGGGS linker. So, combination 2 comprised hFMCH2 and a tagged light chain having the general structure (from N-terminus to C-terminus or “N to C” for short) NYHLENEVARLKKL-[GGGGS]-[hFMCL2]; combination 3 comprised hFMCH3 and a tagged light chain having the general structure N to C NYHLENEVARLKKL-[GGGGS]-[hFMCL2]; combination 7 comprised hFMCH4b and a tagged light chain having the general structure NYHLENEVARLKKL-[GGGGS]-[hFMCL2b]; and so on. These light chain N-terminal (LCNT) switch sequences are listed below in Table 7.

TABLE 6
Humanized FMC63 variants

| HC/LC | | | Light | |
|---|---|---|---|---|
| combination | Round 1 | Heavy chain | chain | Notes |
| 1 | human | H1 (N/A) | L1 (N/A) | fully human |
| | | | | frameworks |
| | | | | (not expressed) |
| 2 | | H2 | L2 | |
| 3 | | H3 | L2 | |
| 4 | | H4a | L2 | |
| 5 | | H4b | L2 | |
| 6 | Round 2 | H4b | L2a | |
| 7 | | H4b | L2b | |
| 8 | | H4b | L2c | |
| 9 | | H4c | L2a | |
| 10 | | H4c | L2b | |
| 22 | | H4c | L2c | |
| 11 | | H4z | L2 | |
| 12 | | H4c-E | L2b | Gln-Glu mutation |
| | | | | on N-terminus |
| | | | | heavy chain |
| 13 | | H4c-kappa | L2b | kappa chain leader |
| | | | | sequence |
| 14 | Round 3 | H4c-E | L2b | |
| 15 | | H4b-E | L2b | |
| 16 | | H4b-x-E | L2b | |
| 17 | | H4c-x-E | L2b | |
| 18 | | H4b-20L-E | L2b | |
| 19 | | H4c-20L-E | L2b | |
| 20 | | H4c-E | L2b-44L | |
| 21 | | H4c-E | L2b-A92N | |

In Table “E” notes that the N-terminal glutamine was mutated to glutamate to avoid formation of the pyroglutamate N-terminal residue.

TABLE 7
LCNT Light Chain Sequences

| SEQ | | |
|---|---|---|
| ID | | |
| NO | NAME | SEQUENCE |
| 27 | hFMCL1-LCNT | NYHLENEVARLKKLGGGGSDIQMTQSPSSLSASVGDRVTITCRASQDI |
| | | SKYLNWYQQKPGKAPKLLIYHTSRLHSGVPSRFSGSGSGTDFTLTISS |
| | | LQPEDFATYYCQQGNTLPYTFGQGTKLEIK |
| 28 | hFMCL2-LCNT | NYHLENEVARLKKLGGGGSDIQMTQSPSSLSASVGDRVTITCRASQDI |
| | | SKYLNWYQQKPGKAPKLLIYHTSRLHSGVPSRFSGSGSGTDYTLTISS |
| | | LQPEDFATYYCQQGATLPYTFGQGTKLEIK |
| 29 | hFMCL2a-LCNT | NYHLENEVARLKKLGGGGSDIQMTQSPSSLSASVGDRVTITCRASQDI |
| | | SKYLNWYQQKPSGKAVKLLIYHTSRLHSGVPSRFSGSGSGTDYTLTISS |
| | | LQPEDFATYYCQQGATLPYTFGQGTKLEIK |
| 30 | hFMCL2b-LCNT | NYHLENEVARLKKLGGGGSDIQMTQSPSSLSASVGDRVTITCRASQDI |
| | | SKYLNWYQQKPSGKAVKLLIYHTSRLHSGVPSRFSGSGSGTDYTLTISS |
| | | LQPEDFATYFCQQGATLPYTFGQGTKLEIK |
| 31 | hFMCL2b-1-LCNT | NYHLENEVARLKKLGGGGSDIQMTQSPSSLSASVGDRVTITCRASQDI |
| | | SKYLNWYQQKPSGKAPKLLIYHTSRLHSGVPSRFSGSGSGTDYTLTISS |
| | | LQPEDFATYFCQQGATLPYTFGQGTKLEIK |
| 32 | hFMCL2b(V44L)- | NYHLENEVARLKKLGGGGSDIQMTQSPSSLSASVGDRVTITCRASQDI |
| | LCNT | SKYLNWYQQKPSGKALKLLIYHTSRLHSGVPSRFSGSGSGTDYTLTISS |
| | | LQPEDFATYFCQQGATLPYTFGQGTKLEIK |
| 33 | hFMCL2b(A92N)- | NYHLENEVARLKKLGGGGSDIQMTQSPSSLSASVGDRVTITCRASQDI |
| | LCNT | SKYLNWYQQKPSGKAVKLLIYHTSRLHSGVPSRFSGSGSGTDYTLTISS |
| | | LQPEDFATYFCQQGNTLPYTFGQGTKLEIK |
| 34 | hFMCL2c-LCNT | NYHLENEVARLKKLGGGGSDIQMTQSPSSLSASVGDRVTITCRASQDI |
| | | SKYLNWYQQKPSGKAVKLLIYHTSRLHSGVPSRFSGSGSGTDYTLTISS |
| | | LQPEDFATYFCQQGATLPYTFGQGTKLEIK |
| 35 | mFMC63-LCNT | NYHLENEVARLKKLGGGGSDIQMTQTTSSLSASLGDRVTISCRASQDI |
| | | SKYLNWYQQKPDGTVKLLIYHTSRLHSGVPSRFSGSGSGTDYSLTISN |
| | | LEQEDIATYFCQQGNTLPYTFGGGTKLEIK |

### Example 2

### Expression and Purification of Humanized CAR-EC Switches

[0554] Briefly, to express and purify humanized CAR-EC Switches, one heavy chain variant, as described in Table 4, was paired with one light chain variant, as described in Table 5, according to the schematic shown in Table 6, wherein the light chain comprised the GCN4 peptide linked via the GGGGS linker in the LCNT format, as shown in Table 7, and the resulting switch was expressed and purified according to the following protein expression method.

Protein Expression in Expi293F Cells (30 ml culture volume)

[0555] Transfections of Expi293F cells (ThermoFisher, Waltham, Mass., Catalog Number A14527) were carried out using a modified version of the manufacturer's protocol provided with the ExpiFectamine 293 Transfection kit (ThermoFisher, Waltham, Mass., Catalog Number A14524).

[0556] Briefly, 24 hours prior to transfection, Expi293F cells (ThermoFisher, Waltham, Mass., Catalog Number A14527) were seeded at 1.5×10⁶ cells/ml in pre-warmed Expi293 Expression Media (ThermoFisher, Waltham, Mass., Catalog Number A1435101). On the day of transfection, cells were counted, checked for viability, and then diluted in pre-warmed Expi293 Expression Media to a final density equal to 2.9×10⁶ cells/ml. The flask was returned to the orbital shaker in 37° C./5% CO2 incubator for a minimum of 1 h.

[0557] Transfections with DNA encoding the CAR-EC switch proteins were performed with a 1:1 heavy-to-light chain ratio (15 μg of DNA for each chain). DNA was diluted in OptiMEM I reduced serum medium to a final volume of 1.5 ml. 80 μl ExpiFectamine was diluted in 1.5 ml OptiMEM I reduced serum medium and incubated 5 min at room temperature. The ExpiFectamine/OptiMEM I mix was added to the tube containing DNA, and then mixed gently with a pipette and incubated 20 min at room temperature. The Expi293F cells were removed from the 37° C./5% CO2 incubator and 3 ml of the DNA/ExpiFectamine mixture was added to the cells and incubated on an orbital shaker at −120 rpm in a 37° C./5% CO2 incubator. 16-18 h post-transfection, 150 μl of Enhancer 1 and 1.5 ml Enhancer 2 (provided in the ExpiFectamine 293 Transfection Kit) was added to each well. The final volume was approximately 30 ml. Finally, 72 hr post-transfection, cells were harvested and switches were purified according to the protocol described below.

### Protein G Purification (0.6 ml Settled Bed Volume)

[0558] 72 hr post-transfection, the 30 ml cell cultures containing the CAR-EC switches were harvested, and cells/media were transfer to a 50 ml conical tube and spun 5 minutes at 400×g (1,000 rpm), sterile filtered, and mixed with 1/40th volume (0.75 ml) of 20× Protein G Binding Buffer (1M sodium acetate) pH 5.2 to lower the pH of the crude CAR-EC switch solutions for optimal binding to Protein G Sepharose.

[0559] A 50% slurry of Protein G Fast Flow Sepharose (GE Healthcare, Product Code 17-0618-01) was prepared in 1× Protein G Binding Buffer, and 1.2 ml of the 50% slurry was added to a 12 ml Poly Prep chromatography column and then washed with 6 ml of 1× Protein G Binding Buffer. Supernatant containing expressed CAR-EC switch protein was passed over the column, and flow-through was collected in 50 ml conical tubes. The column was washed with 12 ml (20 CV) lx Protein G Binding Buffer, and then CAR-EC switch proteins were eluted in 1.8 ml 100 mM glycine pH 2.8, and then 0.2 ml 1M Tris-HCl pH 8 was added to the eluates to neutralize the pH.

[0560] Following elution, 1×PBS pH 7.4 was added to elution fractions to yield a final volume equal to 2.5 ml. Buffer was exchanged into 1×PBS pH 7.4 using PD10 desalting columns as follows: PD10 columns were equilibrated with 25 ml 1×PBS pH 7.4. 2.5 ml of the purified protein solution was added to PD10 column. Protein was eluted from PD10 desalting column in 3.5 ml 1×PBS pH 7.4 and protein fractions were concentrated to approximately 0.200 ml in 4 ml 10K cutoff Amicon spin concentrators.

[0561] Protein concentration was measured by NanoDrop (Thermo Scientific, Waltham, Mass.) according to the manufacturer's protocol, and then 2 μg of protein was visualized by SDS-PAGE on a 4-12% Bis-Tris gradient gel. FIG. 3 and FIG. 4 show photographs of the gels with 2 μg protein loaded in each lane, and analyzed in two conditions: non-reduced (left side) and reduced by the addition of 10 mM DTT (right side).

[0562] All of the humanized CAR-EC switch variants expressed well.

### Example 3

### Determination of CAR-EC Switch Binding Efficiency

[0563] To determine the relative binding efficiency of humanized variants, flow cytometry based binding was carried out as follows:

### Preparation of Cells for Flow Cytometry Analysis of CAR-EC Switch Binding Efficiency.

[0564] CD19+ RS4;11 cells (ATCC® CRL-1873™) were harvested and centrifuged at 300×g for 5 min at 4° C. and then cells were resuspended in ice cold FACs buffer (PBS, 5% fetal calf serum, 1 mM EDTA) at a concentration of 5×10⁶ cells/mL. 100 μL of cell suspension was dispensed per well of a 96-well plate, and then the cells were washed using the following Wash Method: a) 200 μL of FACs buffer was added to each well of the plate; b) the plate was centrifuged at 300×g for 5 min at 4° C.; c) supernatant was removed from the plate by ‘flick’ motion into a sink; d) the cell pellets were loosened by gentle vortexing of the plate; and e) cells pellets were re-suspended in an appropriate volume of buffer (as described below).

[0565] For initial CAR-EC switch binding, the cell pellets from Wash Method step e) were each re-suspended with 50 μl of primary “test” CAR-EC switch protein diluted in FACS buffer. A range of CAR-EC switch concentrations were used to test binding, for example ranging from 10⁻¹ to 10³ pM CAR-EC switch.

[0566] Cells were incubated with the CAR-EC switches at 4° C., in the dark, for 30 minutes, and then cells were washed 3 times using the Wash Method described above. Each cell pellet from Wash Method step e) was re-suspended with 50 μL of detection antibody diluted 1/100 in FACS buffer (Detection antibody was PE-conjugated goat anti-human Kappa: Southern Biotech, cat. #2060-09). Cells were incubated at 4° C., in the dark, for 30 minutes, washed 3 times using the Wash Method described above, and then cell pellets from Wash Method step e) were re-suspended with 100 μL FACS buffer.

[0567] Data was acquired on a flow cytometer configured for a U-bottom 96-well plate, with a laser setting of 3 Blue 1 Red. Gates were established to identify cell population of interest, single cells and PE-positive cells, and 30,000 events were acquired.

### Data Analysis

[0568] Flow cytometry data was analyzed using FlowJo Software V10 (FlowJo, LLC, Ashland, Oreg.). Briefly, mean fluorescent intensity (MFI) of PE signal was obtained on all events, but we did not gate on PE positive cells. An XY table was created in GraphPad Prism (GraphPad Software, Inc., La Jolla, Calif.) and the data was input to plot PE MFI vs CAR-EC switch concentration. Data was transformed using the X=log function and then fit using the “log (agonist) vs response (three parameter)” function. FIG. 5, FIG. 6, FIG. 7, FIG. 8, and FIG. 9 show the data plots for the various tested CAR-EC switches. EC₅₀ values are shown next to the plots.

### Example 4

### Determination of CAR-EC Switch Efficacy for Inducing Target Cell Cytotoxicity

[0569] To determine the efficacy of the humanized FMC63 variants as switches for the switchable CAR-T cell platform, variants were expressed with the GCN4 peptide on the N terminus of the light chain (LCNT) connected with a GGGGS linker as described in Example 1, above, and switches were expressed and purified with one heavy and one light chain-LCNT variant and purified to homogeneity as described above in Examples 1 and 2.

[0570] The sCAR-T cell was constructed as previously described in Rodgers D T (2016), supra. The construct is briefly described as antiGCN4 scFv-IgG4m hinge-CD8 transmembrane domain-CD137 (aka 4-1BB) costimulatory domain-CD3z activation domain.

### Cytotoxicity Assay Method

[0571] Cytotoxicity assays were carried out as follows. On Day 1, a 6-point serial dilution of the switches in cold RPMI-5 was prepared in a flat bottomed 96 well plate using 1 column for each switch. Optionally, switch plates were stored at 4° C. for 1 week, or snap frozen on dry ice and stored at −80° C. long term. Samples were run in duplicate or triplicate. Additionally, the following controls were included:
[0572] i. Maximum kill—target cells only, which were lysed 45 min before the end of the assay to provide a value for the maximum LDH level/100% cytotoxicity. Maximum kill is also referred to as “maximum LDH value.”
[0573] ii. Spontaneous kill—target cells only, which act as a background target cell lysis.
[0574] iii. Effector cells alone—this control indicates background LDH signal of effector cells, for use in diagnostics if assay doesn't work.
[0575] iv. Effector and target cells alone—no switch control to determine background cytotoxicity as a result of co-culturing cells.
[0576] v. Media alone—control for media for use in diagnostics if assay doesn't work, and for calculating cytotoxicity of conventional CAR-T cells.

[0577] Cells were centrifuged at 300×g for 5 minutes at room temperature, and seeded in pre-warmed RPMI-5 media at a concentration of 2×10⁶/mL for the CAR effector cells and at 2×10⁵/mL for the target cells. Target and CAR effector cells had >95% viability to reduce background. For standard assays, 100,000 effector cells (E) and 10,000 target cells (T) were used, giving an E:T ratio of 10:1. Assays used 50 μL of effector cells and 50 μL of target cells in each well, and then the wells were topped off with media to ensure equal volume in all wells. Finally, 2 μL of the CAR-EC switch dilutions were added to the relevant wells and then the plates were incubated for 20-24 hours.

### LDH Assay Method: Day 2, Running the LDH Assay:

[0578] LDH assays were carried out using the CytoTox 96® Non-Radioactive Cytotoxicity Assay (Promega, G1780) according to the manufacturer's protocol. All buffers and reagents listed below in this assay are components of this CytoTox 96® kit. Briefly, on Day 2, 45 minutes before the end of the assay, 10 μL of 10× lysis buffer was added to the ‘Maximum Kill’ control wells, and the cells were manually lysed by multiple pipetting actions.

[0579] LDH master mix was prepared by adding 12 mL of assay buffer thawed in a 37° C. water bath to 1 vial of LDH assay working reagent. After the 45 minute incubation of the Maximum Kill control wells with the lysis buffer, the plate was centrifuged at 400×g for 5 minutes and 30 μL of the supernatants were transferred to identical wells in a new 96 well plate (flat bottomed). 30 pt of LDH working reagent was added to each well and incubated for 30 minutes at room temperature in the dark. Then, 30 μL of the Stop Solution was added to each well and the absorbance was read at OD495 and data was exported as .txt or .xlsx files.

### LDH Assay Data Analysis:

[0580] Raw data was transferred into Microsoft Excel and a 100% cytotoxicity value for the assay was calculated using the following formula: OD Maximum kill minus OD Spontaneous kill.

[0581] The ‘Effector and Target cells alone’ value (i.e., OD495 reading) was subtracted from all sample values.

[0582] Percent cytotoxicity was calculated using the following formula:

100×(Sample OD495/max LDH value)

[0583] Values were plotted in GraphPad Prism. Data was transformed using the X=log function and EC₅₀ values were calculated using the “log (agonist) vs response (three parameter)” fit function.

### LDH Cytotoxicity Assay Results:

[0584] LDH cytotoxicity assay results are shown in FIGS. 10-11. Specifically, FIG. 10 shows LDH cytotoxicity of sCAR-EC cells (e.g., sCAR-T cells) against RS4;11 cells, which are CD19-positive, and FIG. 11 shows LDH cytotoxicity of sCAR-EC cells (e.g., sCAR-T cells) against K562 cells, which are CD19-negative. In both cases, the sCAR-EC cells (e.g., sCAR-T cells) were 80% positive for the expression of the switchable CAR, and the cells were treated with one of the various humanized CAR-EC switch variants listed in the legend.

[0585] Strong dose-dependent induction of CD19-positive RS4;11 cell cytotoxicity was observed by treatment with the sCAR/humanized switch combination (FIG. 10, Table 8). Table 8 shows the EC₅₀ values for the LDH cytotoxicity assay with various humanized switches repeated over 4 assays. The assays are numbered DTR-5-15 (shown in FIG. 10), DTR-5-16, DTR-5-50, DTR-5-51. Assays in which cells are labeled PBMC are switchable CAR-T cells derived from transduction of unsorted PBMCs, and assays in which the cells are labeled CD4:CD8 are switchable CAR-T cells derived from sorted CD4 and CD8 T cells, transduced, and used in equal ratios in the cytotoxicity assay. muFMC63 LCNT indicates the murine FMC63-based switch.

TABLE 8
EC₅₀ values for cytotoxicity assay with humanized switches (4 repeat assays).

| | EC₅₀ (pM) | | | | |
|---|---|---|---|---|---|
| Switch | DTR-5-15 | DTR-5-16 | DTR-5-50 | DTR-5-51 | Average |
| hFMCL2c-LCNT/hFMCH4c | 4.57 | 4.61 | 3.78 | 5.45 | 4.60 |
| muFMC63 LCNT (Batch P00958) | | 6.81 | 2.77 | 5.31 | 4.96 |
| hFMCL2c-LCNT/hFMCH4b | 4.04 | 3.25 | 3.78 | 9.65 | 5.18 |
| hFMCL2b-LCNT/hFMCH4b | 5.17 | 5.78 | 3.93 | 9.96 | 6.21 |
| hFMCL2a-LCNT/hFMCH4b | 10.41 | 6.03 | 5.29 | 5.45 | 6.80 |
| hFMCL2b(V44L)-LCNT/ | 2.04 | 8.45 | 7.01 | 12.32 | 7.45 |
| hFMCH4c(Q1E) | | | | | |
| hFMCL2a-LCNT/hFMCH4c | 4.43 | 9.32 | 7.05 | 17.19 | 9.50 |
| hFMCL2b-LCNT/ | 7.10 | 9.41 | 8.25 | 13.28 | 9.51 |
| hFMCH4c(Q1E) | | | | | |
| hFMCL2b(A92N)-LCNT/ | 8.73 | 9.19 | 6.55 | 15.21 | 9.92 |
| hFMCH4c(Q1E) | | | | | |
| hFMCL2b-LCNT/ | 9.63 | 13.12 | 7.48 | 9.60 | 9.96 |
| hFMCH4b(Q1E-V20L) | | | | | |
| hFMCL2b-LCNT/hFMCH4c | 8.41 | 8.47 | 7.54 | 16.54 | 10.24 |
| hFMCL2b-LCNT/ | 7.15 | 10.54 | 6.97 | 20.72 | 11.34 |
| hFMCH4b(Q1E) | | | | | |
| muFMC63 LCNT (Batch 2) | 11.75 | 14.65 | 6.36 | 17.28 | 12.51 |
| hFMCL2b-LCNT/ | 7.52 | 15.28 | 14.42 | 14.83 | 13.01 |
| hFMCH4c(Q1E-V20L) | | | | | |
| hFMCL2-LCNT/hFMCH4b | 21.44 | 7.43 | 18.73 | 14.64 | 15.56 |
| hFMCL2-LCNT/hFMCH4c | 16.62 | 15.97 | 9.20 | 30.08 | 17.97 |
| hFMCL2-LCNT/hFMCH4a | 43.20 | 50.73 | 28.27 | 40.68 | 40.72 |
| hFMCL2b-LCNT/hFMCH4c-x- | 28.34 | 81.83 | 15.14 | 51.48 | 44.20 |
| (Q1E) | | | | | |
| hFMCL2b-LCNT/hFMCH4b-x- | 29.60 | 77.64 | 43.84 | 63.94 | 53.76 |
| (Q1E) | | | | | |
| hFMCL2-LCNT/hFMCH2 | 141.20 | 79.00 | 38.64 | 78.51 | 84.34 |
| hFMCL2-LCNT/hFMCH3 | 139.10 | 77.09 | 61.41 | 72.62 | 87.56 |
| Cells | PBMC | CD4:CD8 | PBMC | CD4:CD8 | |

[0586] In contrast to the strong dose-dependent induction of CD19-positive RS4;11 cell cytotoxicity observed by treatment with the sCAR/humanized switch combination (FIG. 10), little to no LDH cytotoxicity of sCAR-EC cells (e.g., sCAR-T cells) against CD19-negative K562 cells was observed by treatment with the sCAR/humanized switch combination (FIG. 11). Thus, cytotoxicity induced sCAR/humanized switch combinations are specific to cells expressing the target antigen (CD19), and non-specific activation of cytotoxicity does not occur merely due to the binding of the switch to its sCAR-T cell.

[0587] To determine if a correlation existed between binding affinity (by flow cytometry) and activity (by in vitro cytotoxicity), the affinities were plotted along with the cytokine release and EC₅₀ of cytotoxicity for each candidate (waterfall plot of cytotoxicity shown in FIG. 22A, correlations shown in FIG. 22B). A linear relationship was found between affinity and EC₅₀ as well as between cytokine release and EC₅₀ in vitro with e's shown in the figure: Higher potency (lower) EC₅₀'s provided higher cytokine release (measured at 0.1 nM of switch) and higher potency (lower) EC₅₀'s were found to correlate with higher affinity humanized candidates.

[0588] To assay how these candidates functioned in vivo, a NALM-6 assay was conducted using our standard conditions (FIG. 22C). In the first experiment, four candidates, L2b/H4b, L2b/H4c, L2c/H4b, L2c/H4c, were tested in this model using the original 4-1BB-based murine 52SR4 CAR-T candidate (TSY-2-193). In the second experiment, the original 4-1BB-based murine 52SR4 CAR-T candidate was repeated and compared with the third generation 28BB L5H4 candidate sCAR-T cell. Overall the humanized switch candidate L2b/H4c eliminated tumors in 5 of 9 mice. This was superior to other candidates. The alignment of this candidate with the humanized framework regions and the original murine FMC63 sequence is provided in FIG. 23.

[0589] The humanized switch candidate L2b/H4c had favorable biophysical characteristics through a developability analysis that included high resolution MS, thermal stability, in silico T cell epitope analysis (immunogenicity), and CIC, SIC, HIC, SEC chromatographies. Specifically, L2b/H4c had improved thermal stability and yields over the chimeric FMC63-based switch (FIG. 22D). Analytical size exclusion showed the L2b/H4c candidate was a monomer.

### Example 5

### Immunogenicity Analysis of Clone hFMC2b-LCNT/hFMCH4c

[0590] Using the EpiMatrix system (EpiVax, Inc, Providence, R.I.), the amino acid sequence of the light chain huFMCL2b-LCNT (note, in some embodiments, “hu” an “h” are used interchangeably in various constructs, e.g., huFMCL2b and hFMCL2b to designate that the construct is at least partially humanized), and the heavy chain hFMCH4c sequences were analyzed for both overall and regional immunogenic potentials. In addition, we have screened these sequences against the non-redundant human protein databases at Genbank for MHC Class II epitopes and the immune epitope database at the La Jolla Institute for Allergy and Immunology, available at the world wide web address: iedb.org/ (the contents of which is incorporated herein by reference in its entirety). Finally, we have combined heavy and light chain variable domains in order to evaluate the immunogenic potential of the complete huFMC antibody.

[0591] All other factors being equal, the more HLA ligands (i.e. EpiMatrix hits) contained in a given protein, the more likely that protein is to induce an immune response. To capture this concept, we used an EpiMatrix Protein Score. The EpiMatrix Protein Score is the difference between the number of predicted T cell epitopes we would expect to find in a protein of a given size and the number of putative epitopes predicted by the EpiMatrix System. The EpiMatrix Protein Score is correlated with observed immunogenicity. EpiMatrix Protein Scores are “normalized” and can be plotted on a standardized scale. The EpiMatrix Protein Score of an “average” protein is zero. EpiMatrix Protein Scores above zero indicate the presence of excess MHC ligands and denote a higher potential for immunogenicity while scores below zero indicate the presence of fewer potential MHC ligands than expected and a lower potential for immunogenicity. Proteins scoring above +20 are considered to have a significant immunogenic potential.

[0592] Adjusting for the Presence of Regulatory T cell Epitopes. Antibodies are unique proteins in that the amino acid sequences of their variable domains, especially their Complementarity Determining Regions (CDRs), can vary to an extraordinary extent. It is this variability that allows antibodies to recognize a wide variety of antigens. However, this flexibility comes with a price. The recombination and mutation events that control antibody maturation can also produce new or neo-T cell epitopes. These neo-epitopes can appear to be “foreign” to circulating T cells. The presence of neo-epitopes in antibody sequences can lead to the formation of a human-anti-human antibody response; the so-called HAHA response.

[0593] Regulatory T cells play an important role in suppressing immune responses to fully human proteins in the periphery, including those containing mutated and/or highly variable sequences such as antibody CDRs. Regulatory T cells are engaged and activated by regulatory T cell epitopes. We believe the inherent risk associated with the presence of neo-epitopes in antibody sequences is balanced by the presence of naturally occurring regulatory T cell epitopes.

[0594] By screening the sequences of many human antibody isolates, we have identified several highly conserved HLA ligands which we believe have a regulatory potential. Experimental evidence suggests many of these peptides are, in fact, actively tolerogenic in most subjects. We refer to these highly conserved fragments as Tregitopes. The Tregitope observation has been published in Blood (De Groot, A S, et al., Blood (2008) October 15; 112(8):3303-11; incorporated herein by reference in its entirety), and many candidate Tregitopes are patent pending. In many cases, the immunogenic potential of neo-epitopes contained in humanized antibodies can be effectively controlled in the presence of significant numbers of Tregitopes. For the purposes of antibody immunogenicity analysis, we have developed a Tregitope-adjusted EpiMatrix Score and corresponding prediction of anti-therapeutic antibody response. To calculate the Tregitope-adjusted EpiMatrix Score, we deduct the scores of the Tregitopes from the EpiMatrix Protein Score of the antibody's combined variable domains. In our experience, Tregitope adjusted scores are well correlated with observed clinical immune response.

[0595] After adjusting for the presence of Tregitopes, the EpiMatrix Protein Scores of antibody variable domains tend to run low. The average Tregitope-adjusted EpiMatrix Protein Score of 22 licensed antibodies is −20.71. Of course, not all antibodies are created equal. Some contain many Tregitopes while others contain few or none at all. The average Tregitope-adjusted EpiMatrix Protein Score of 10 antibodies known to induce anti-therapeutic antibodies in more than 5% of exposed subjects is −4.77. The average Tregitope-adjusted EpiMatrix Protein Score of 12 antibodies known to induce anti-therapeutic antibodies in less than 5% of exposed subjects is −34.01. The presence of significant numbers of Tregitopes correlates well with low observed immunogenicity. Considering all of the antibodies in our sample, the coefficient of correlation between Tregitope-adjusted EpiMatrix Score and observed immunogenicity is 0.76 (see FIG. 12).

[0596] It is interesting to note the apparent contradiction between the relatively low Tregitope-adjusted average score of immunogenic antibodies (−4.77) and the relatively high incidence of observed anti-therapeutic immune response. We suggest that neo-epitopes contained in the CDRs of antibodies are significant risk factors even in otherwise low scoring antibodies. As suggested above, we believe the high risk associated with antibody CDRs is probably the evolutionary driver behind the development and retention of Tregitopes within the human antibody germline.

### Results.

[0597] In analyzing the submitted heavy and light chain sequences a total of 3,520 frame-by-allele assessments were performed. A summary of the findings is presented below in Table 9.

TABLE 9
Overall immunogenic potential of hFMC2b-LCNT/hFMCH4c sequences

| | | | | | Treg-Adj |
|---|---|---|---|---|---|
| Protein | | | EpiMatrix | EpiMatrix | EpiMatris |
| Label | Length | Assessments | Hits | Score | Score |
| huFMC HC | 223 | 1,720 | 104 | 6.63 | −22.51 |
| huFMC LC1 | 233 | 1,800 | 111 | 13.98 | −15.70 |

Table 9 labels: huFMC HC = hFMCH4c; huFMC LC1 = hFMC2b-LCNT.

[0598] FIG. 13 presents our findings on a graphical scale and also shows how the submitted sequences rate against a series of standard controls.

[0599] hFMCH4c contains a total of 104 EpiMatrix hits. Its Tregitope-adjusted EpiMatrix Protein Score is −22.51. This score falls on the lower end of our scale and indicates a limited potential for immunogenicity. hFMC2b-LCNT contains a total of 111 EpiMatrix hits. Its Tregitope-adjusted EpiMatrix Protein Score is −15.70. This score falls in the neutral range of our scale and indicates a slightly reduced potential for immunogenicity. Looking at the combined huFMC variable domains, we calculate a Tregitope-adjusted EpiMatrix Protein Score of −13.73, and based on a regression of Tregitope-adjusted EpiMatrix Protein Score against observed clinical immunogenicity in a set of licensed monoclonal antibody products, predict an anti-drug antibody rate of 5.7%. Compared to other licensed antibodies known to be non-immunogenic, these scores are slightly elevated, indicating at least some potential for anti-therapeutic response.

### Example 6

### Modifying the GCN4 Peptide Epitope

[0600] To determine the optimal epitope for binding to the 52SR4 (anti-GCN4) CAR, we modified the GCN4 peptide sequence (SEQ ID NO: 138) at various positions, thus creating GCN4 peptide derivatives.

[0601] In SEQ ID NO: 139, the GCN4 epitope was expanded by 3 residues on the N-terminus and 1 residue on the C-terminus.

[0602] In SEQ ID NO: 140, residue L1 was mutated to D and N5 was mutated to Q. This was based on an alternative sequence of the GCN4 peptide found in the literature in which the first five residues of the GCN4 peptide are DLPKQ (Zahnd C, et al. The Journal of Biological Chemistry, Vol. 279, No. 18, Issue of April 30, pp. 18870-18877, 2004).

[0603] In SEQ ID NO: 141, residues K and L were removed from the C-terminus to determine whether a shorter sequence, truncated from the C-terminus was still active

[0604] In SEQ ID NO: 142, L1 was removed to determine if this residue was involved in activity.

[0605] In SEQ ID NO: 143, L1 and L2 were removed to determine if these residues were involved in activity and to understand the viability of expression for a sequence starting with proline.

[0606] In SEQ ID NO: 144, L1, L2 and P3 were removed to further truncate the protein to determine impact on activity.

[0607] In SEQ ID NO: 145, L1, L2, P3 and K4 were removed to further truncate the protein to determine impact on activity.

[0608] In SEQ ID NO: 146, L1, L2, P3, K4 and L18 were removed; K17 was replaced with A to extend the peptide from the C-terminus (separating the GGGGS linker from the peptide) while eliminating the double lysine (KK) motif that existed there in the original peptide sequence.

[0609] In SEQ ID NO: 147, K17 was replaced with A to eliminate the double lysine (KK) motif that existed there in the original peptide sequence.

[0610] In SEQ ID NO: 148, L1, L2 and P3 were removed; K17 was replaced with A to eliminate the double lysine (KK) motif that existed there in the original peptide sequence and to test this in combination with the extended peptide motif shown in A.

[0611] In SEQ ID NO: 149, L1, L2, P3 and K4 were removed; K17 was replaced with A to eliminate the double lysine (KK) motif that existed there in the original peptide sequence.

[0612] In SEQ ID NO: 150, L1, L2, P3 and K4 were removed; K17 was replaced with G to eliminate the double lysine (KK) motif that existed there in the original peptide sequence.

[0613] In SEQ ID NO: 151, L1, L2, P3 and K4 were removed; K17 was replaced with A and L18 was replaced with A to eliminate the double lysine (KK) motif that existed there in the original peptide sequence.

[0614] In SEQ ID NO: 152, L1, L2, and P3 were removed; K17 was replaced with G to eliminate the double lysine (KK) motif that existed there in the original peptide sequence.

[0615] In SEQ ID NO: 153, L1, L2, and P3 were removed; K17 was replaced with A and L18 was replaced with A to eliminate the double lysine (KK) motif that existed there in the original peptide sequence.

[0616] In SEQ ID NO: 245, L1, L2, P3 and K4 are removed and the epitope is expanded by 1 residue on the C-terminus.

[0617] Switches containing each of the peptides listed in Table 10 were created by expression said peptides in the LCNT format on the murine FMC63 anti-CD19 antibody clone in FAB format.

[0618] The binding of the modified epitope switches to switchable CAR-T cells (52SR4 sCAR) was tested using the same binding assay (detailed above in Example 3) (FIG. 20).

[0619] The activity of the modified epitope switches was tested in an LDH cytotoxicity assay as described above in Example 4, and the EC₅₀ values were determined as described above (FIG. 21).

TABLE 10
GCN4 epitope sequences

| SEQ | | |
|---|---|---|
| ID | | |
| NO | NAME | SEQUENCE |
| 138 | GCN4 | NYHLENEVARLKKL |
| 139 | GCN4-A | LLPKNYHLENEVARLKKL |
| 140 | GCN4-B | DLPKQYHLENEVARLKKL |
| 141 | GCN4-C | LLPKNYHLENEVARLK |
| 142 | GCN4-D | LPKNYHLENEVARLK |
| 143 | GCN4-E | PKNYHLENEVARLK |
| 144 | GCN4-F | KNYHLENEVARLK |
| 145 | GCN4-G | NYHLENEVARLK |
| 146 | GCN4-H | NYHLENEVARLKA |
| 147 | GCN4-I | LLPKNYHLENEVARLKAL |
| 148 | GCN4-J | KNYHLENEVARLKAL |
| 149 | GCN4-K | NYHLENEVARLKAL |
| 150 | GCN4-L | NYHLENEVARLKGL |
| 151 | GCN4-M | NYHLENEVARLKAA |
| 152 | GCN4-N | KNYHLENEVARLKGL |
| 153 | GCN4-O | KNYHLENEVARLKAA |
| 245 | GCN4-GK | NYHLENEVARLKK |

### Example 7

### Comparison of Costimulatory Domains

[0620] To determine the effect of the costimulatory domain on sCAR-T cell activity, the anti-GCN4 peptide sCAR scFv (clone 52SR4) was subcloned from our previously reported second generation 4-1BB based construct [Rodgers, D. T. (2016)] to vectors harboring a second generation CD28 costimulatory (costim) domain or a third generation CD28/4-1BB (28BB) costim domain [Zhang (2007); Zhong (2010)]. The IgG4m hinge (SEQ ID NO: 168) and CD8 transmembrane (TM) (IYIWAPLAGTCGVLLLSLVITLYC; SEQ ID NO: 398) domains were retained as to be consistent with our previous designs. Transduction of these constructions into healthy donor-derived T cells failed to demonstrate surface expression of the scFv (data not shown). As second generation and third generations constructs have been widely used elsewhere, we hypothesized the failure of our constructs was due to an incompatibility in the fusion of the CD8TM or IgG4m hinge region with the CD28 costim. To test this hypothesis, the CD28 TM or CD28 TM with CD28 hinge were used to replace the CD8 TM and IgG4m hinge to produce sCAR constructs A-F (FIG. 24A). Transduction into healthy donor-derived cells demonstrated both IgG4m hinge/CD28TM/CD28 costim and CD28 hinge/CD28TM/CD28 costim expressed scFv to the surface of the cell, confirming the incompatibility of the CD8 TM with CD28 costim in the early constructs. The sequences of the various extracellular, transmembrane, and intracellular domains included in the CAR constructs are shown in FIG. 24C.

[0621] Flow binding experiments using Alexa Fluor 647-labeled GCN4 peptide (binds tightly to and labels the anti-GCN4 scFv) demonstrated the 28BB construct (E) afforded lower surface expression compared with constructs harboring CD28 (C) or 4-1BB (A) costimulatory domains alone (FIG. 25A). In vitro cytotoxicity assays demonstrated the 28BB constructs (E) also had marginally weaker EC₅₀ of cytotoxicity using titration of an anti-CD19 switch against CD19⁺ RS4;11 cells compared with the original construct (A) (FIG. 25B to FIG. 25D). No activity against antigen negative cells was observed with either hinge nor transmembrane changes, indicating the specificity of the sCAR-T cell was not corrupted (data not shown). In line with our previous hypothesis that a shorter immunological synapse results in more potent cytotoxicity, constructs with the short 12 amino acid IgG4m hinge (A, B, and C) had more potent cytotoxicity in these assays than the corresponding longer 39 amino acid CD28 hinge constructs (D and F) (FIGS. 25C and 25D). This effect was consistent across multiple donors. In contrast, no difference in the EC₅₀ of cytotoxicity was found between the CD8 (A) and CD28 (B) based transmembrane domains.

[0622] Constructs were next tested in an in vivo NALM-6 xenograft model in which a single dose of sCAR-T cells (iv) was provided to NSG mice with established tumor burden, followed by every other day dosing of the switch (iv) for 14 days and monitoring of mice for relapse. This model employed half the number of CAR-T cells than our previous report [Rodgers (2016)] to create a more challenging model in order to emphasize the differences between constructs. To increase robustness of the comparison, the model was run with T cells from three separate donors. Under these conditions, the original 4-1BB based construct (A) afforded variable elimination of disease. In this model, the 28BB construct (E) cleared tumor (7 of 9 mice cleared post-dosing) more effectively than 4-1BB (A) (3 of 7 mice cleared post-dosing) (FIG. 25E). The CD28-based construct (C) demonstrated relapse during the dosing period and failed to clear any mice (0 of 8 mice cleared). In line with our previous results, the IgG4m hinge was requisite for in vivo activity, as constructs (D) and (F), which employed the CD28 hinge with CD28 and or BB28 costim domains, respectively, failed to significantly control tumor burden in any animals (FIG. 26).

[0623] The acute cytokine release, measured 24 h after the first dose of switch, was similar between 4-1BB (A), CD28 (C) and 28BB (E) constructs, with only the CD28 construct (C) exhibiting lower levels of IFNg than the original 4-1BB construct (A) (FIG. 25F). This was compared with the conventional CAR-T construct modeled after the recently approved Kymriah (CART19) which employs the 4-1BB costimulatory domain and CD8TM and hinge. CART19 exhibited significantly greater IL-2 and TNF cytokine release under these conditions. Remarkably, the BB28 construct with the IgG4m hinge (E) exhibited a 24-fold increase in CD4 and a 5-fold increase in CD8 cell expansion directly following the dosing period compared with the original 4-1BB-based construct (A) (FIG. 25G). This expansion was approximately 41-fold and 15-fold greater than CD4 and CD8 in CART19, respectively. The greater expansion of CD4 cells over CD8 compared with the 4-1BB costimulatory domain is in line with previous reports that the addition of the CD28 stimulation can increase CD4 expansion [Kagoya (2017)]. Therefore, the third generation 28BB based construct (E) can produce significantly greater T cell expansion resulting in greater efficacy in the switchable CAR-T platform but with markedly lower cytokine release.

### Example 8

### Humanization of the sCAR

[0624] The 52SR4 scFv that directs the specificity of the sCAR for the PNE peptide of the switch was derived from directed evolution of a murine antibody library [Hanes (1998); Zahnd (2004)]. These murine sequences have the potential to be immunogenic in humans. Immunogenicity of the transgene in engineered T cells has caused anaphylaxis in patients and has been shown to be a contributing factor to rejection of the cells from the patient [Berger (2006); Jensen (2010); Maus (2013)]. For these reasons we humanized the 52SR4 scFv.

[0625] Briefly, murine 52SR4 sequences for variable heavy (VH) and variable light (VL) domains were submitted to the IgBLAST program on the NCBI website (www.ncbi.nlm.nih.gov/igblast/). Each murine sequence was compared to murine germline sequences and then compared to human germline sequences. The murine VH sequence is derived from murine IGHV2-6-7 germline and the murine VL sequence is derived from murine IGLV1 germline (FIG. 27A). The murine VH is closest to human VH germline IGHV4-59 and murine VL is closest to human VL kappa germline IGLV7-46.

[0626] The murine VH sequence was aligned with human IGHJ4-59VH; CDR definition is provided in FIG. 27A (world wide web address: bioinf.org.uk/abs/). Four different humanized VH frameworks were used to generate humanized sequences: h52SR4H1-H4 (FIG. 28).

[0627] h52SR4H1 (constructs referred to as H1, 2, 3, 4 . . . etc. throughout) is a CDR-swap in which the murine CDRs have been transplanted onto human IGHJ4-59 framework (i.e., with no framework changes). h52SR4H2 added framework changes at positions 71 (sequential numbering), which affects CDR-H2 conformation, and positions 93-94, which can affect CDR-H3 conformation. h52SR4H3 added additional buried framework changes to improve internal packing of the VH domain. h52SR42b/3b tested addition of Asn73. Based on Zahnd et al. [Zahnd (2004)], LeuH28Ser (H30 in Zahnd et al. AHo antibody numbering) and IleH56Ser/Thr (H67 in Zahnd et al. AHo antibody numbering) improved binding affinity. At both positions the hydrophobic sidechain is completely exposed to solvent. LeuH30 would not have a direct interaction with the target in crystal structure PDB 1P4B, while IleH56 has only a minor interaction with target.

[0628] Murine VL was aligned with human IGLV-7-46; CDR definition is provided in FIG. 27A (www.bioinf.org.uk/abs/). Several different humanized VL frameworks were used to generate humanized sequences: h52SR4VL1-3 (constructs referred to as L1, 2, 3 . . . etc. throughout) (FIG. 29). CDR-L1 and CDR-L2 include sequences that have a low propensity for deamidation (FIG. 2AVL). Computer graphics models of the VH:VL pairs of murine and humanized 5F11 were constructed to aid in the humanization. From this alignment and analysis, unique humanized scFv sequences were constructed and cloned in place of the murine 52SR4 scFv in the original second generation 4-1BB-based construct (A in FIG. 24; SEQ ID NO: 389).

[0629] Based on our initial results comparing the costimulatory domains, neither levels of CAR expression nor in vitro efficacy could sufficiently predict the superior in vivo efficacy of the 28BB construct. Further, conventional CD19 and GD2 CARs that have equivalent in vitro efficacy, have been shown to have very different in vivo antitumor activities due to differences in tonic signaling [Gargett (2016)]. For this reason, to identify humanized candidates for further investigation we ran an in vivo screen in the NALM-6 xenograft mouse model.

[0630] Forty-five humanized candidates (Table 11) in the 4-1BB vectors (see Construct A, FIG. 24A) were transduced individually into healthy human donor-derived T cells and injected (iv) into separate NSG mice (minimum N=3 for each candidate). FIG. 24

TABLE 11
Humanized CAR variants used in FIG. 27B

| | Unique Clone name | LC and HC |
|---|---|---|
| 1. | TSY-3-192 | L5H4 |
| 2. | TSY-3-190 | L5H6 |
| 3. | TSY-3-191 | L2H6 |
| 4. | TSY-3-193 | L6H6 |
| 5. | TSY-4-19 | L5H4-E6Q |
| 6. | TSY-4-20 | L5H6-73T |
| 7. | TSY-4-23 | L5-12S, H4-E6Q |
| 8. | TSY-4-24 | L6-46F, H4-E6Q |
| 9. | TSY-4-83 | L5-1090, H4 |
| 10. | TSY-4-84 | L5del109, H4 |
| 11. | TSY-4-85 | L5H4-A87D |
| 12. | ENH-4-129 | L5(12S)H4 |
| 13. | ENH-4-130 | L5(12S-69D) H4 |
| 14. | ENH-4-132 | L5(12S-23R) H4 |
| 15. | ENH-4-133 | L5(12S) H487S) |
| 16. | ENH-4-134 | L5(12S) H487D) |
| 17. | ENH-4-135 | L5(125-69D-109S) (H487S) |
| 18. | ENH-4-136 | H4L5(12S) |
| 19. | ENH-4-137 | H4(87S) L512S-69D-109S) |
| 20. | ENH-4-138 | LC H4 |
| 21. | ENH-4-140 | LC H4(87S) |
| 22. | ENH-4-141 | L5(12S-69D-109S) |
| 23. | ENH-4-85 | L5 H4-A870 |
| 24. | ENH-5-40 | L5-L109D H4-A87D, E6Q |
| 25. | ENH-5-41 | L5-V12S, L109D H4-A87D |
| 26. | ENH-5-42 | L5-V12S, L109D H4-A87D, E6Q |
| 27. | ENH-5-43 | L5-109D, HC |
| 28. | ENH-5-44 | L5-12S, 109D, HC |
| 29. | ENH-5-45 | LC, H4-A87D, E6Q |
| 30. | ENH-5-46 | LC, H4-A87D |
| 31. | ENH-5-59 | H4(E6Q), L5 |
| 32. | ENH-5-47 | L2 H4-A87D |
| 33. | ENH-5-48 | L3 H4-A87D |
| 34. | ENH-5-49 | L4 H4-A87D |
| 35. | ENH-5-50 | L5(V12S) H4-A87D |
| 36. | ENH-5-51 | L5-V12S H4-A87D |
| 37. | ENH-5-52 | L5-dL109 H4-A87D |
| 38. | ENH-5-53 | L5-V12S, L69D H4-A87D |
| 39. | ENH-5-54 | L5-V12S, G23R H4-A87D |
| 40. | ENH-5-55 | L5-V12S, L69D, L109S H4-A87D |
| 41. | ENH-5-56 | L6 H4-A87D |
| 42. | ENH-5-57 | L6-P46F H4-A87D |
| 43. | ENH-4-86 | L5-L109D H4-A87D |
| 44. | ENH-5-141 | L5 H4-E6Q, A87D |
| 45. | TSY-4-70 | L2 H3 |

[0631] Treatment with switch was carried out every other day for 14 days per our standard protocol (FIG. 27B). Clones that afforded complete tumor elimination (<10⁴ radiance by IVIS, approximately the limit of detection of tumor in this model, at day 50, 30 days after the last dosage of switch) were selected for further study (Table 12).

TABLE 12
Humanized CAR variants used in FIG. 27B

| | Unique Clone name | LC and HC |
|---|---|---|
| 1. | TSY-4-19 | L5H4-E6Q |
| 2. | TSY-4-83 | L5-109D, H4 |
| 3. | TSY-4-84 | L5del109, H4 |
| 4. | TSY-4-85 | L5H4-A87D |
| 5. | ENH-5-40 | L5-L109D H4-A87D, E6Q |
| 6. | ENH-5-42 | L5-V12S, L109D H4-A87D, E6Q |

[0632] These clones were derived from the base clone light chain sequence L5 and heavy chain sequence H4 with mutations in the light chain at V12S or L109D, and heavy chain at E6Q or A87D (FIG. 30).

[0633] Although these mutations do not directly interact with the peptide binding, they have been reported or hypothesized to have other effects, including long-range conformational changes, or impacts on protein folding that may affect the scFv structure and correlatively the sCAR-T cell activity. Furthermore, with the exception of the buried HC E6Q residue, the residues were surface exposed, suggesting they may also play a role in protein-protein interactions through non-specific hydrophobic interactions. This may be significant in the case of scFvs which have certain residues of the former Fab variable region/constant region interface exposed, resulting in a higher frequency of hydrophobicity in scFv molecules compared with Fabs [Nieba (1997)].

[0634] The LC V12S mutant was identified in the Zahnd et al. (2004) (referred to as LC T13S in the publication using AHo numbering scheme) as a mutation which arose from in vitro evolution of the 52SR4 scFv from the parent C11L34 base clone. It is possible that this mutation increases the affinity of the scFv; however, based on the existing data we cannot exclude that it is a passenger in the evolution of high affinity in the 52SR4 clone. The LC 109 residue is the penultimate amino acid of the light chain with the final amino acid being glycine, followed by a GGGGS linker. Although this residue was not identified through the previous in vitro evolution studies and is conserved across the human and mouse frameworks, it protrudes from the structure, forming a hydrophobic surface that may increase interactions with other non-specific proteins. Thus, the LC L109D mutation may be beneficial in reducing surface hydrophobicity.

[0635] According to Zahnd et al. (2004), the HC “mutation H6(Glu to Gln) improved the affinity, by a factor of 2, to 20 pM when compared with clone C11L34”, supporting the study of this mutation in the HC. It was hypothesized in the publication that this mutation exerted an effect though “long range interactions or ‘molecular shimming,’ influencing the orientation or flexibility of a loop or domain.” In other reference this residue has been shown to influence the conformation of the N-terminal portion of the heavy chain [Honegger (2001)]. Therefore, there was good support for further investigation of the impact of this residue on sCAR-T cell activity. Finally, the surface exposed HC residue 87 has been previously studied in development of the 4-4-20 anti-FITC scFv [Nieba (1997)]. In this study, the Nieba, et al. found that mutation of this residue to D (84D in Kabat numbering) reduced aggregation in protein folding, while not significantly altering the binding affinity or thermal stability of the scFv. Thus, good support existed for studying these mutations.

[0636] To test the effect of these mutations on sCAR-T cell function, 7 humanized scFv variants were created from the L5H4 base clone along with the mutations discussed above (FIG. 27C). To test their activity amongst different costimulatory domains, the CARs were subcloned into 4-1BB, CD28, or 28BB-based vectors (A, C, or E, respectively, in FIG. 24) to create 21 total vectors. The rationale to test in multiple costimulatory domain backgrounds was to pressure test the sCARs with the context that CD28-based costimulatory domains have been shown to exacerbate tonic signaling while 4-1BB may mask tonic signaling [Long (2015)]. Therefore, testing sCAR-T cell activity in the context of a single costimulatory domain may not be sufficient to differentiate activity. In vitro cytotoxicity assays demonstrated that the variants had insignificant differences in EC₅₀ of cytotoxicity against CD19+ RS4;11 cells with titration of the anti-CD19 switch (FIG. 27D).

[0637] The candidates were next compared with the murine 52SR4 sCAR construct for their ability to eliminate NALM-6 tumors in vivo (FIG. 27E). During the expansion of cells for these models, CAR+ T cells were sorted by affinity column to normalize potential differences in CAR expression that resulted from the scFv variant. Correspondingly, tumor elimination in these models was found to be slightly improved compared with previous models shown in FIG. 25. CAR vectors with 4-1BB or CD28-based costimulatory domains had variable tumor elimination, however sorting had improved the ability of CD28-based CARs to control tumor burden compared with our initial models. Due to the potency of the third generation 28BB costimulatory domain, all candidates and the murine CAR completely eliminated tumor after the dosing period. To pressure test this model further, mice were rechallenged at day 30 with NALM-6 again. No additional CAR-T cells were provided, and switch dosing was initiated 6 days after challenge (day 36) per the standard protocol. At day 36, tumor burden in these animals was comparable to the initial challenge suggesting the sCAR-T cells had no effect on tumor growth in the absence of the switch dosing. The second dosing period was carried out as with the first, every other day for 14 days, after which tumor was again eliminated in all groups. The majority of mice remained clear through the end of the study with relapse in a small number of individual mice apparent at day 60.

[0638] All sCARs in these experiments exhibited promising levels of tumor clearance. To differentiate the most promising candidates the in vivo function of the humanized scFv was averaged across multiple co-stimulatory domain formats (CD28+CD3z, 4-1BB+CD3z and CD28+41BB+CD3z) to remove bias introduced by the respective signaling features of each construct. The terms “CD3z”; “CD3 zeta”; and “CD3ζ” are used interchangeably, herein. The following in vivo parameters were averaged across each CAR-T construct: (A) tumor IVIS value at day 10, 20, 31 and 45 post tumor challenge; (B) T cell expansion measured 2 days after the end of switch dosing, and (C) day of tumor relapse (IVIS ROI>104). Each parameter series was ranked for disease relevance: (A) representing tumor clearance/relapse, was ranked low to high; (B) representative of T cell expansion throughout activation, was ranked high to low; and (C) representative of level of initial tumor clearance, was ranked low to high. Therefore, through this analysis the best CAR constructs would have low tumor burden (A) with strong T cell expansion (B) and relapse infrequently (C). Each parameter was ranked within each co-stimulatory domain cohorts and then averaged to produce a total rank score. The standard deviation of the ranks was calculated as a measure of rank variance. Using this ranking system, the sCAR E (L5-L109D, H4-E6Q, A87D) was the most promising candidate (FIG. 31). The addition of the LC L109D, HC E6Q, and HC A87D to the L5H4 base clone significantly increased T cell expansion in vivo. Cytokines were marginally different among the sCAR candidates (FIG. 32). As found previously with the comparison of costimulatory domains, the cytokine release at 24 h was not predictive of in vivo efficacy and thus was not included in the ranking of sCAR candidates. However, it should be noted that the 28BB CARs release greater TNFalpha than their 4-1BB counterparts, albeit, not significantly in FIG. 25. Similarly, the sCAR E candidate released greater TNFa than other clones, correlating with its in vivo activity.

[0639] We further investigated these candidates using extended ex vivo expansion (FIG. 33). Briefly, the assays were conducted by transducing healthy donor-derived T cells individually with each CAR candidate. Cultures were activated at day zero with CD3/CD28 beads and IL-2 was provided throughout the culture process, but the cells were not re-stimulated. Candidates were sorted for CAR+ cells at day 5 and expanded in culture flasks for 33 days with analysis of number of cells, transduction efficiency (CAR+ cells), and in vitro cytotoxicity weekly. As has been reported elsewhere, CAR candidates with 4-1BB based costimulatory domains expanded nearly 10³-fold after sorting, while CD28 and third generation CARs had markedly lower expansion (FIG. 33). Transduction efficiency for 4-1BB-based CARs remained consistent while CD28-based CARs had a marked loss in CAR+ cells. It was not determined if this was due to loss of CAR expression or due to the expansion of CAR-negative cells overtaking the CAR+ cells in cell culture. Third generation 28BB-based CARs lost some transduction efficiency after sorting but appeared to normalize near 50%.

[0640] In vitro cytotoxicity was tested weekly for each candidate (FIG. 34 and FIG. 35). Throughout the course of the extended ex vivo expansion assay, 4-1BB-based candidates had similar EC₅₀ of cytotoxicity and maximum levels of cytotoxicity (defined by the % lysed target cells using a saturating amount of switch molecule). Similarly, BB-28 candidates had similar EC₅₀s and maximum target cell lysis throughout the time course. Interestingly, CD28-based candidates lost potency, exhibited by an increase in EC₅₀ of cytotoxicity along with a decrease in maximum target cell lysis. This was most apparent for clones harboring the V12S mutation. Correspondingly these clones score weakest on their ability to control tumor burden in vivo.

### Example 8

### Combination of Humanized Switch and Humanized Car

[0641] To determine the efficacy of the humanized switch candidate L2b/H4c with the humanized sCAR candidates L5H4 (FIGS. 27C-27E, candidate A), L5H4-A87D (FIGS. 27C-27E, candidate B), L5H4-E6Q,A87D (FIGS. 27C-27E, candidate C), and L5-L109D-H4-E6Q,A87D (FIGS. 27C-27E, candidate E), a NALM-6 model was conducted as previously described, except 5 million sCAR-T cells were used instead of 20 million cells (FIG. 36). Under these conditions, CAR-T cell efficacy is challenged, resulting in a reduction, but not elimination of tumor. These conditions thus allow resolution of minor differences between the humanized sCAR candidates. In this model candidate E provided the greatest control of tumor burden. The activity of this sCAR when paired with the L2b/H4c humanized switch was comparable to the conventional CART-19.

### Example 9

### Heterogeneous Tumors

[0642] The ability of sCAR-T cells to target more than one tumor antigen at the same or different times was tested in a heterogeneous Raji xenograft tumor model. Raji cells, naturally positive for CD19 and CD20, were modified by CRISPR knockout of the gene for CD19 resulting in a CD19− CD20+ Raji cell line. Wild type Raji cells were mixed with this cell line at ratios of 1:1, 4:1, or 49:1, respectively, and injected IV into NSG mice to establish disseminated tumors (FIG. 37). Both cell lines were luciferized to follow tumor burden by IVIS. After 3 days, the mice were treated with sCAR-T cells or CART-19. In the 1:1 group, switch dosing with mixed anti-CD19 switch and anti-CD20 switch commenced on day 3, four hours after delivery of the sCAR-T cells (FIG. 37A). In this model, CART-19 modestly slowed tumor burden but was unable to eliminate tumor completely. This was hypothesized to be due to the ability of CART-19 to eliminate the wild type Raji cells without having a detrimental effect on the growth of the CD19-negative Raji cells. The sCAR-T cell group eliminated tumor in 3 of 3 mice using a mixture of anti-CD19 and anti-CD20 switches. Relapse of tumor was observed and treated with anti-CD20 switch. This subsequent switch treatment eliminated tumor in 2 of the 3 mice. This experiment demonstrated the same sCAR-T cell can be redirected to multiple tumor antigens simultaneously.

[0643] A second model using a 4:1 mixture (FIG. 37B) of wild type Raji cells to CD19-negative Raji cells was carried out similarly to the 1:1 model, except in this model, dosing stated with the anti-CD19 switch only. When tumor burden (presumed to be from the CD19-negative population) rose to a radiance of 10⁵ (average), mice were treated with the anti-CD20 switch using the standard every other day for 14 days dosing regimen. This was effective at eliminating tumor in all mice. Relapse was treated with additional anti-CD20 switch which eliminated tumor in 1 of 3 mice. The CART-19 group had marginal activity against the mixture of cells, with animals ultimately succumbing to the CD19-negative Raji tumor burden as in model one.

[0644] A third model using 49:1 mixture (FIG. 37C) of wild type Raji cells to CD19-negative Raji cells was carried out similarly to the 4:1 model. When tumor burden (presumed to be from the CD19-negative population) rose to a radiance of 10⁵ (average), mice were treated with the anti-CD20 switch using the standard every other day for 14 days dosing regimen. In this group, dosing with anti-CD20 switch started one day after the completion of anti-CD19 dosages. Similar to the first and second models, CART19 cells eliminated wild type Raji cells, but not CD19-negative Raji cells with all tumors relapsing in this group. Conversely, 5 out of 6 mice treated with sCAR T cells and anti-CD19 and anti-CD20 switches presented no tumor after the dosing period, with one relapse close to the end of the model. Together, second and third models demonstrated that the same sCAR-T cells can be redirected to different antigens sequentially rather than simultaneously.

### Example 10

### Syngeneic System

[0645] A fully murine, syngeneic switchable CAR-T cell platform was developed to test the activity of sCAR-T cells in the context of an immunocompetent animal model. In these models, C3H immunocompetent mice were used with the 38c13 tumor cell line. Briefly, mice were inoculated with tumor SC at day zero and tumors allowed to establish to between 500-1000 mm³. Mice were then preconditioned with cyclophosphamide and murine sCAR-T cell delivered 24 hours later, with switch doses commencing 4 hours after sCAR-T cells and continuing every other day for 14 days. Only a single dose of sCAR-T cells were provided to the animals.

[0646] Differential activity based on hinge length was found in our preliminary reports for human sCAR-T cells. To determine if this effect was observed in the mouse system, murine sCARs were constructed harboring the IgG4 short, dimeric hinge (murine sCAR SV-319-092) or with the mouse CD8 hinge (murine sCAR SV-319-089). Constructs are described in FIG. 38). In vivo SV-319-092 afforded complete elimination of tumor, while SV-319-089 had markedly weaker control, supporting our prior conclusions that shorter hinges afford greater efficacy in sCAR-T cells due to a shorter immunological synapse (FIG. 39A). Thus, the murine system is a physiologically similar platform to our human system and well suited for studying sCAR-T cell activity.

[0647] Different hinge constructs were tested next. Briefly, murine sCAR-T cells were constructed with CD28 (SV-319-090), 4-1BB (SV-391-091), or BB28 (SV-319-092) murine costimulatory domains (Group 2 in FIG. 38) and tested in the 38c13 model in C3H mice. The SV-319-090 construct with the murine costimulatory domain failed to control tumor burden with all mice succumbing to disease prior to day 35 (data not shown). Both SV-391-091 and SV-319-092 eliminated tumor in all mice (data not shown). Second and third cycles of dosing in these animals were provided after tumor elimination as in FIG. 39B and sCAR-T cell populations measured periodically. In this experiment, murine sCAR-T cells expanded after each dosing with SV-319-092 28BB-based murine sCAR-T cell expanding marginally better than the SV-391-091 4-1BB-based murine sCAR-T cell. Thus, this experiment demonstrated the expansion potential of the 28BB-based costimulatory domain. Murine CD28-based costimulatory domain sCAR-T cells were excluded from this analysis due to their failure to survive beyond day 35.

[0648] The SV-319-092 28BB-based murine sCAR-T was also able to efficiently eliminate B cells. In a model where both B cells and T cells were measured (FIG. 39C), murine sCAR-T cells expanded after each dose and were inversely related to B cell populations. A rest phase was included between each dosing period. The rest phase allowed B cells to repopulate the mouse as shown in FIG. 39C.

[0649] To determine if switch dosing had an impact on memory the murine sCAR-T cell model, SV-319-092 cells were injected into preconditioned mice without tumor. Dosing was then provided in four different regimens (FIG. 39D): high (5 mg/kg) or low (0.2 mg/kg) for short (4 doses) or long (12 doses) dosing periods using every other day IV injection. This was compared with the existing dosing regimen of 8 doses every other day. These dosing periods were followed by a rest phase shown in FIG. 39D. After the rest phase, dosing was resumed with each group receiving the same regimen as prior, still every other day dosing. After 4 doses (6 total days), T cell counts and phenotypes were measured. Remarkably, the high, short group demonstrated a 10³ fold expansion compared with the other groups. This expansion was transient and declined after dosing had stopped. This finding demonstrates that the murine sCAR-T cells have memory of their prior dosing regimen and when re-synced after a rest phase, that memory can be recalled, creating large expansions of cells. Phenotyping of the cells in FIG. 39E illustrates the expansion was dominantly effector memory CD8 cells at day 35. After dosing had stopped, at day 53, a contraction of the effector memory population was observed, while a central memory population was comparatively similar to day 35. This finding highlights the utility of temporal control over sCAR-T cell activity, provided by a switch.

### REFERENCES

[0650] 1. Zola H, et al. Preparation and characterization of a chimeric CD19 monoclonal antibody. Immunology and cell biology. 1991; 69 (Pt 6):411-22. Epub 1991/12/01. doi: 10.1038/icb.1991.58. PubMed PMID: 1725979.
[0651] 2. Porter D L, et al. Chimeric antigen receptor-modified T cells in chronic lymphoid leukemia. The New England journal of medicine. 2011; 365(8):725-33. Epub 2011/08/13. doi: 10.1056/NEJMoa1103849. PubMed PMID: 21830940.
[0652] 3. Grupp S A, et al. Chimeric antigen receptor-modified T cells for acute lymphoid leukemia. The New England journal of medicine. 2013; 368(16):1509-18. Epub 2013/03/27. doi: 10.1056/NEJMoa1215134. PubMed PMID: 23527958.
[0653] 4. Porter D L, et al. Chimeric antigen receptor T cells persist and induce sustained remissions in relapsed refractory chronic lymphocytic leukemia. Science translational medicine. 2015; 7(303):303ra139. doi: 10.1126/scitranslmed.aac5415. PubMed PMID: 26333935.
[0654] 5. Rodgers D T, et al. Switch-mediated activation and retargeting of CAR-T cells for B-cell malignancies. Proceedings of the National Academy of Sciences of the United States of America. 2016; 113(4):E459-68. doi: 10.1073/pnas.1524155113. PubMed PMID: 26759369.
[0655] 6. Zhang, H., et al., 4-1BB is superior to CD28 costimulation for generating CD8+ cytotoxic lymphocytes for adoptive immunotherapy. J Immunol, 2007. 179(7): p. 4910-8.
[0656] 7. Zhong, X. S., et al., Chimeric antigen receptors combining 4-1BB and CD28 signaling domains augment PI3kinase/AKT/Bcl-XL activation and CD8+ T cell-mediated tumor eradication. Mol Ther, 2010. 18(2): p. 413-20.
[0657] 8. Kagoya, Y., et al., Transient stimulation expands superior antitumor T cells for adoptive therapy. JCI Insight, 2017. 2(2): p. e89580.
[0658] 9. Hanes, J., et al., Ribosome display efficiently selects and evolves high-affinity antibodies in vitro from immune libraries. Proc Natl Acad Sci USA, 1998. 95(24): p. 14130-5.
[0659] 10. Zahnd, C., et al., Directed in vitro evolution and crystallographic analysis of a peptide-binding single chain antibody fragment (scFv) with low picomolar affinity. J Biol Chem, 2004. 279(18): p. 18870-7.
[0660] 11. Berger, C., et al., Analysis of transgene-specific immune responses that limit the in vivo persistence of adoptively transferred HSV-TK-modified donor T cells after allogeneic hematopoietic cell transplantation. Blood, 2006. 107(6): p. 2294-302.
[0661] 12. Jensen, M. C., et al., Antitransgene rejection responses contribute to attenuated persistence of adoptively transferred CD20/CD19-specific chimeric antigen receptor redirected T cells in humans. Biol Blood Marrow Transplant, 2010. 16(9): p. 1245-56.
[0662] 13. Maus, M. V., et al., T cells expressing chimeric antigen receptors can cause anaphylaxis in humans. Cancer Immunol Res, 2013. 1(1): p. 26-31.
[0663] 14. Gargett, T., et al., GD2-specific CAR T Cells Undergo Potent Activation and Deletion Following Antigen Encounter but can be Protected From Activation-induced Cell Death by PD-1 Blockade. Mol Ther, 2016. 24(6): p. 1135-49.
[0664] 15. Nieba, L., et al., Disrupting the hydrophobic patches at the antibody variable/constant domain interface: improved in vivo folding and physical characterization of an engineered scFv fragment. Protein Eng, 1997. 10(4): p. 435-44.
[0665] 16. Honegger, A. and A. Pluckthun, Yet another numbering scheme for immunoglobulin variable domains: an automatic modeling and analysis tool. J Mol Biol, 2001. 309(3): p. 657-70.
[0666] 17. Long, A. H., et al., 4-1BB costimulation ameliorates T cell exhaustion induced by tonic signaling of chimeric antigen receptors. Nat Med, 2015. 21(6): p. 581-90.

[0667] The various embodiments described above can be combined to provide further embodiments. All of the U.S. patents, U.S. patent application publications, U.S. patent application, foreign patents, foreign patent application and non-patent publications referred to in this specification and/or listed in the Application Data Sheet are incorporated herein by reference, in their entirety. Aspects of the embodiments can be modified, if necessary to employ concepts of the various patents, application and publications to provide yet further embodiments.

[0668] These and other changes can be made to the embodiments in light of the above-detailed description. In general, in the following claims, the terms used should not be construed to limit the claims to the specific embodiments disclosed in the specification and the claims, but should be construed to include all possible embodiments along with the full scope of equivalents to which such claims are entitled. Accordingly, the claims are not limited by the disclosure.

1-199. (canceled)

200. A humanized chimeric antigen receptor (CAR) comprising an extracellular domain, a transmembrane domain, and an intracellular signaling domain; wherein the extracellular domain comprises a humanized anti-GCN4 scFv comprising a sequence selected from SEQ ID NOS: 290-388, and 423; and wherein the extracellular domain optionally comprises (i) a humanized region that interacts with a chimeric antigen receptor switch; and (ii) a hinge domain.

201. The CAR of claim 200, wherein the scFv comprises the amino acid sequence SEQ ID NO: 322.

202. The CAR of claim 200, comprising a structure selected from structures A-H in FIG. 24A.

203. The CAR of claim 200, wherein the CAR comprises a sequence selected from SEQ ID NOS: 389-397, 401, 403, 405, 407, 409, 413, and 415; or wherein the CAR comprises the amino acid sequence SEQ ID NO: 411.

204. The CAR of claim 200, wherein (i) the extracellular domain comprises a hinge domain comprising a sequence selected from SEQ ID NOS: 93-103 and 165-168; (ii) the transmembrane domain comprises an amino acid sequence selected from SEQ ID NO: 398 and 417; and/or (iii) the intracellular signaling domain comprises (a) a CD3-zeta domain and (b) a CD28 domain; a 4-1BB domain; or a CD28 domain and a 4-1BB domain.

205. A chimeric antigen receptor-effector cell (CAR-EC) switch comprising:
a. a chimeric antigen receptor-interacting domain (CAR-ID) comprising a GCN4 derivative peptide that interacts with an anti-GCN4 chimeric antigen receptor on the CAR-EC; and
b. a targeting moiety;
wherein the targeting moiety is a targeting antibody, or an antigen binding portion thereof, which comprises (i) a light chain sequence selected from any one of SEQ ID NOS: 17-25, 27-35, 247, 249, 251, 253, 255, 257, 259, 261, 263, 265, and 267; (ii) a heavy chain sequence selected from any one of SEQ ID NOS: 2-15, 248, 250, 252, 254, 256, 258, 260, 262, 264, 266, and 268; or (iii) a light chain sequence selected from any one of SEQ ID NOS: 17-25, 27-35, 247, 249, 251, 253, 255, 257, 259, 261, 263, 265, and 267; and a heavy chain sequence selected from any one of SEQ ID NOS: 2-15, 248, 250, 252, 254, 256, 258, 260, 262, 264, 266, and 268; and
wherein, optionally, the targeting moiety is a scFv.

206. The CAR-EC switch of claim 205, comprising a light chain sequence of SEQ ID NO: 30 and a heavy chain sequence of SEQ ID NO: 7.

207. The CAR-EC switch of claim 205, comprising a light chain/heavy chain sequence pair selected from (i) SEQ ID NO: 30/SEQ ID NO: 7; (ii) SEQ ID NO: 30/SEQ ID NO: 6; (iii) SEQ ID NO: 34/SEQ ID NO: 6; and (iv) SEQ ID NO: 34/SEQ ID NO: 7.

208. The CAR-EC switch of claim 205, comprising a light chain selected from any one of SEQ ID NOS: 17-25; wherein the CAR-EC switch comprises a CAR-ID that is a GCN4 peptide selected from any one of SEQ ID NOS: 26, 36, 139-163 and 245; and wherein the CAR-EC switch is a LCNT switch.

209. A humanized chimeric antigen receptor-effector cell (CAR-EC) switch comprising:
a. a chimeric antigen receptor-interacting domain (CAR-ID) that interacts with a chimeric antigen receptor on the CAR-EC; and
b. a humanized targeting moiety that binds CD19 on a target cell; wherein the humanized targeting moiety is selected from a humanized antibody that binds CD19 and a humanized antigen binding portion of an antibody that binds CD19; and wherein the humanized targeting moiety comprises (i) a humanized FMC63 antibody, or an antigen binding portion of a humanized FMC63 antibody; (ii) a light chain sequence selected from the group consisting of SEQ ID NOS: 16-25; 27-35; (iii) a heavy chain sequence selected from the group consisting of SEQ ID NOS: 1-15; and (iv) a light chain sequence selected from the group consisting of SEQ ID NOS: 16-25; 27-35 and a heavy chain sequence selected from the group consisting of SEQ ID NOS: 1-15.

210. The switch of claim 209, wherein the CAR-ID comprises (i) a peptide or (ii) a small molecule; wherein the peptide is optionally selected from a yeast transcription factor GCN4 peptide, a variant GCN4 peptide that does not dimerize; a flag tag peptide; a non-naturally occurring peptide, a naturally occurring peptide, a synthetic peptide tag, an alpha helix-forming peptide, a K4 peptide, an E4 peptide; a GCN4 peptide selected from a sequence of Structure I, a sequence listed in Table 10, and a sequence selected from SEQ ID NOS: 26, 36, 139-163 and 245; and wherein the small molecule is optionally selected from a hapten and a hapten that is FITC.

211. The switch of claim 209, comprising a light chain sequence of SEQ ID NO: 30 and a heavy chain sequence of SEQ ID NO: 7.

212. A kit comprising (i) the CAR-EC switch and a CAR-EC; (ii) a CAR-EC comprising a humanize CAR and a CAR-EC switch, (iii) a humanized CAR-EC switch and a CAR-EC comprising a humanized CAR; or the CAR-EC switch of claim 209 and a CAR-EC.

213. A method of treating a subject in need thereof with (i) a CAR-EC switch of claim 209 and a CAR-EC or (ii) a CAR-EC and a CAR-EC switch comprising:
a. a chimeric antigen receptor-interacting domain (CAR-ID) comprising a GCN4 derivative peptide that interacts with an anti-GCN4 chimeric antigen receptor on the CAR-EC; and
b. a targeting moiety;
wherein the targeting moiety is a targeting antibody, or an antigen binding portion thereof, which comprises (i) a light chain sequence selected from any one of SEQ ID NOS: 17-25, 27-35, 247, 249, 251, 253, 255, 257, 259, 261, 263, 265, and 267; (ii) a heavy chain sequence selected from any one of SEQ ID NOS: 2-15, 248, 250, 252, 254, 256, 258, 260, 262, 264, 266, and 268; or (iii) a light chain sequence selected from any one of SEQ ID NOS: 17-25, 27-35, 247, 249, 251, 253, 255, 257, 259, 261, 263, 265, and 267; and a heavy chain sequence selected from any one of SEQ ID NOS: 2-15, 248, 250, 252, 254, 256, 258, 260, 262, 264, 266, and 268; and
wherein, optionally, the targeting moiety is a scFv.

214. The method of claim 213, wherein the CAR-EC expresses the CAR of claim 200.

215. A CAR-EC expressing the CAR or claim 200.

216. A pharmaceutical composition comprising one or more pharmaceutically acceptable salts, excipients or vehicles and
(A)
the CAR-EC switch of claim 200;
(B)
1. a chimeric antigen receptor-interacting domain (CAR-ID) that interacts with a chimeric antigen receptor on the CAR-EC; and
2. a humanized targeting moiety that binds CD19 on a target cell; wherein the humanized targeting moiety is selected from a humanized antibody that binds CD19 and a humanized antigen binding portion of an antibody that binds CD19; and wherein the humanized targeting moiety comprises (i) a humanized FMC63 antibody, or an antigen binding portion of a humanized FMC63 antibody; (ii) a light chain sequence selected from the group consisting of SEQ ID NOS: 16-25; 27-35; (iii) a heavy chain sequence selected from the group consisting of SEQ ID NOS: 1-15; and (iv) a light chain sequence selected from the group consisting of SEQ ID NOS: 16-25; 27-35 and a heavy chain sequence selected from the group consisting of SEQ ID NOS: 1-15; or
(C) at least two CAR-EC switches, wherein at least one of the at least two CAR-EC switches is a CAR-EC switch according to (A) or (B).

217. A polynucleotide encoding a CAR-EC switch; a vector comprising the polynucleotide encoding a CAR-EC switch; or a host cell comprising the polynucleotide encoding a CAR-EC switch or the vector comprising the polynucleotide encoding a CAR-EC switch; wherein the CAR-EC switch comprises
(A):
the CAR-EC switch of claim 205; or
(B)
a. a chimeric antigen receptor-interacting domain (CAR-ID) that interacts with a chimeric antigen receptor on the CAR-EC; and
b. a humanized targeting moiety that binds CD19 on a target cell; wherein the humanized targeting moiety is selected from a humanized antibody that binds CD19 and a humanized antigen binding portion of an antibody that binds CD19; and wherein the humanized targeting moiety comprises (i) a humanized FMC63 antibody, or an antigen binding portion of a humanized FMC63 antibody; (ii) a light chain sequence selected from the group consisting of SEQ ID NOS: 16-25; 27-35; (iii) a heavy chain sequence selected from the group consisting of SEQ ID NOS: 1-15; and (iv) a light chain sequence selected from the group consisting of SEQ ID NOS: 16-25; 27-35 and a heavy chain sequence selected from the group consisting of SEQ ID NOS: 1-15.

218. A CAR-EC platform comprising a CAR-EC expressing the CAR of claim 200 and a CAR-EC switch; wherein the CAR-EC switch comprises
(A):
a. a chimeric antigen receptor-interacting domain (CAR-ID) comprising a GCN4 derivative peptide that interacts with an anti-GCN4 chimeric antigen receptor on the CAR-EC; and
b. a targeting moiety;
wherein the targeting moiety is a targeting antibody, or an antigen binding portion thereof, which comprises (i) a light chain sequence selected from any one of SEQ ID NOS: 17-25, 27-35, 247, 249, 251, 253, 255, 257, 259, 261, 263, 265, and 267; (ii) a heavy chain sequence selected from any one of SEQ ID NOS: 2-15, 248, 250, 252, 254, 256, 258, 260, 262, 264, 266, and 268; or (iii) a light chain sequence selected from any one of SEQ ID NOS: 17-25, 27-35, 247, 249, 251, 253, 255, 257, 259, 261, 263, 265, and 267; and a heavy chain sequence selected from any one of SEQ ID NOS: 2-15, 248, 250, 252, 254, 256, 258, 260, 262, 264, 266, and 268; and
wherein, optionally, the targeting moiety is a scFv; or
(B)
a. a chimeric antigen receptor-interacting domain (CAR-ID) that interacts with a chimeric antigen receptor on the CAR-EC; and
b. a humanized targeting moiety that binds CD19 on a target cell; wherein the humanized targeting moiety is selected from a humanized antibody that binds CD19 and a humanized antigen binding portion of an antibody that binds CD19; and wherein the humanized targeting moiety comprises (i) a humanized FMC63 antibody, or an antigen binding portion of a humanized FMC63 antibody; (ii) a light chain sequence selected from the group consisting of SEQ ID NOS: 16-25; 27-35; (iii) a heavy chain sequence selected from the group consisting of SEQ ID NOS: 1-15; and (iv) a light chain sequence selected from the group consisting of SEQ ID NOS: 16-25; 27-35 and a heavy chain sequence selected from the group consisting of SEQ ID NOS: 1-15.

219. A method of treating relapsed cancer, comprising administering to a subject:
(1) a first CAR-EC switch comprising:
(A):
i. a chimeric antigen receptor-interacting domain (CAR-ID) comprising a GCN4 derivative peptide that interacts with an anti-GCN4 chimeric antigen receptor on the CAR-EC; and
ii. a targeting moiety;
wherein the targeting moiety is a targeting antibody, or an antigen binding portion thereof, which comprises
(a) a light chain sequence selected from any one of SEQ ID NOS: 17-25, 27-35, 247, 249, 251, 253, 255, 257, 259, 261, 263, 265, and 267;
(b) a heavy chain sequence selected from any one of SEQ ID NOS: 2-15, 248, 250, 252, 254, 256, 258, 260, 262, 264, 266, and 268; or
(c) a light chain sequence selected from any one of SEQ ID NOS: 17-25, 27-35, 247, 249, 251, 253, 255, 257, 259, 261, 263, 265, and 267; and a heavy chain sequence selected from any one of SEQ ID NOS: 2-15, 248, 250, 252, 254, 256, 258, 260, 262, 264, 266, and 268; and
wherein, optionally, the targeting moiety is a scFv; or
(B)
a. a chimeric antigen receptor-interacting domain (CAR-ID) that interacts with a chimeric antigen receptor on the CAR-EC; and
b. a humanized targeting moiety that binds CD19 on a target cell; wherein the humanized targeting moiety is selected from a humanized antibody that binds CD19 and a humanized antigen binding portion of an antibody that binds CD19; and wherein the humanized targeting moiety comprises (i) a humanized FMC63 antibody, or an antigen binding portion of a humanized FMC63 antibody; (ii) a light chain sequence selected from the group consisting of SEQ ID NOS: 16-25; 27-35; (iii) a heavy chain sequence selected from the group consisting of SEQ ID NOS: 1-15; and (iv) a light chain sequence selected from the group consisting of SEQ ID NOS: 16-25; 27-35 and a heavy chain sequence selected from the group consisting of SEQ ID NOS: 1-15;
2) a first CAR-EC comprising a CAR of claim 200; and
3) a second CAR-EC switch comprising a second CAR-ID and a second targeting moiety wherein the second CAR-ID is complementary to the first CAR;
wherein the first CAR-EC switch is administered before the relapse of the subject and the second CAR-EC switch is administered after the relapse of the subject.

220. A method of lysing a target cell and/or killing a target cell, comprising
(A) contacting the target cell with a first CAR-EC switch that comprises
a. a chimeric antigen receptor-interacting domain (CAR-ID) that interacts with a chimeric antigen receptor on the CAR-EC; and
b. a first humanized targeting moiety that binds CD19 on a target cell; wherein the first humanized targeting moiety is selected from a humanized antibody that binds CD19 and a humanized antigen binding portion of an antibody that binds CD19; and wherein the first humanized targeting moiety comprises (i) a humanized FMC63 antibody, or an antigen binding portion of a humanized FMC63 antibody; (ii) a light chain sequence selected from the group consisting of SEQ ID NOS: 16-25; 27-35; (iii) a heavy chain sequence selected from the group consisting of SEQ ID NOS: 1-15; and (iv) a light chain sequence selected from the group consisting of SEQ ID NOS: 16-25; 27-35 and a heavy chain sequence selected from the group consisting of SEQ ID NOS: 1-15; and
contacting the first CAR-EC switch with a complementary CAR-EC, wherein the CAR-EC optionally expresses a CAR of claim 200; or
(B) contacting the target cell with a first CAR-EC switch comprising a targeting moiety and a CAR-ID and contacting the first CAR-EC switch with a complementary CAR-EC, wherein the CAR-EC expresses a CAR of claim 200.

221. A method of activating a CAR-EC comprising contacting a CAR expressed on the CAR-EC with a wherein the CAR-EC switch comprises
(A):
the CAR-EC switch of claim 205; or
(B)
a. a chimeric antigen receptor-interacting domain (CAR-ID) that interacts with a chimeric antigen receptor on the CAR-EC; and
b. a humanized targeting moiety that binds CD19 on a target cell; wherein the humanized targeting moiety is selected from a humanized antibody that binds CD19 and a humanized antigen binding portion of an antibody that binds CD19; and wherein the humanized targeting moiety comprises (i) a humanized FMC63 antibody, or an antigen binding portion of a humanized FMC63 antibody; (ii) a light chain sequence selected from the group consisting of SEQ ID NOS: 16-25; 27-35; (iii) a heavy chain sequence selected from the group consisting of SEQ ID NOS: 1-15; and (iv) a light chain sequence selected from the group consisting of SEQ ID NOS: 16-25; 27-35 and a heavy chain sequence selected from the group consisting of SEQ ID NOS: 1-15.
wherein the CAR-EC is activated when the targeting moiety on the CAR-EC switch is bound to both its target on the target cell and to the extracellular domain of the CAR on the CAR-EC, wherein the CAR binds to the CAR-ID on the CAR-EC switch.

222. A method of treating relapsed cancer in a subject previously treated with a first CAR-EC expressing a CAR directed to CD20, wherein the subject has relapsed cancer due to a decrease in the expression of CD20 on the cancer cells after the relapse as compared to the expression of CD20 before the relapse, the method comprising administering to the subject a CAR-EC switch; wherein the CAR-EC switch comprises
(A):
a. a chimeric antigen receptor-interacting domain (CAR-ID) comprising a GCN4 derivative peptide that interacts with an anti-GCN4 chimeric antigen receptor on the CAR-EC; and
b. a targeting moiety;
wherein the targeting moiety is a targeting antibody, or an antigen binding portion thereof, which comprises (i) a light chain sequence selected from any one of SEQ ID NOS: 17-25, 27-35, 247, 249, 251, 253, 255, 257, 259, 261, 263, 265, and 267; (ii) a heavy chain sequence selected from any one of SEQ ID NOS: 2-15, 248, 250, 252, 254, 256, 258, 260, 262, 264, 266, and 268; or (iii) a light chain sequence selected from any one of SEQ ID NOS: 17-25, 27-35, 247, 249, 251, 253, 255, 257, 259, 261, 263, 265, and 267; and a heavy chain sequence selected from any one of SEQ ID NOS: 2-15, 248, 250, 252, 254, 256, 258, 260, 262, 264, 266, and 268; and
wherein, optionally, the targeting moiety is a scFv; or
(B)
a. a chimeric antigen receptor-interacting domain (CAR-ID) that interacts with a chimeric antigen receptor on the CAR-EC; and
b. a humanized targeting moiety that binds CD19 on a target cell; wherein the humanized targeting moiety is selected from a humanized antibody that binds CD19 and a humanized antigen binding portion of an antibody that binds CD19; and wherein the humanized targeting moiety comprises (i) a humanized FMC63 antibody, or an antigen binding portion of a humanized FMC63 antibody; (ii) a light chain sequence selected from the group consisting of SEQ ID NOS: 16-25; 27-35; (iii) a heavy chain sequence selected from the group consisting of SEQ ID NOS: 1-15; and (iv) a light chain sequence selected from the group consisting of SEQ ID NOS: 16-25; 27-35 and a heavy chain sequence selected from the group consisting of SEQ ID NOS: 1-15
and a second CAR-EC expressing the CAR of claim 200.

223. A method of treating a subject in need thereof, comprising administering the CAR-EC of claim 200 and a complementary CAR-EC switch; wherein the CARE-EC switch comprises a targeting moiety and a CAR-ID, wherein the targeting moiety binds a cell surface molecule on a target cell.

224. A method of controlling the magnitude of a T cell response by modulating the dosing regimen of a CAR-EC switch administration to a subject; wherein the CAR-EC switch comprises
(A): the CAR-EC switch of claim 205; or
(B)
a. a chimeric antigen receptor-interacting domain (CAR-ID) that interacts with a chimeric antigen receptor on the CAR-EC; and
b. a humanized targeting moiety that binds CD19 on a target cell; wherein the humanized targeting moiety is selected from a humanized antibody that binds CD19 and a humanized antigen binding portion of an antibody that binds CD19; and wherein the humanized targeting moiety comprises (i) a humanized FMC63 antibody, or an antigen binding portion of a humanized FMC63 antibody; (ii) a light chain sequence selected from the group consisting of SEQ ID NOS: 16-25; 27-35; (iii) a heavy chain sequence selected from the group consisting of SEQ ID NOS: 1-15; and (iv) a light chain sequence selected from the group consisting of SEQ ID NOS: 16-25; 27-35 and a heavy chain sequence selected from the group consisting of SEQ ID NOS: 1-15.

The application's sequence listing, which the Patent Office published only in electronic form, follows.

SEQUENCE LISTING (423 sequences)

SEQ ID NO: 1 - protein, 97 aa, Artificial Sequence
  Synthesized heavy chain sequence
QVQLQESGPGLVKPSETLSLTCTVSGGSISSYYWSWIRQPPGKGLEWIGYIYYSGSTNYNPSLKSRVTISVDTSKNQFSLKLSSVTAADTAVYYCAR

SEQ ID NO: 2 - protein, 120 aa, Artificial Sequence
  Synthesized heavy chain sequence
QVQLQESGPGLVKPSETLSLTCTVSGVSLPDYGVSWIRQPPGKGLEWIGVIWGSETTYYNPSLKSRVTISVDTSKNQFSLKLSSVTAADTAVYYCARHYYYGGSYAMDYWGQGTLVTVSS

SEQ ID NO: 3 - protein, 120 aa, Artificial Sequence
  Synthesized heavy chain sequence
QVQLQESGPGLVKPSETLSVTCTVSGVSLPDYGVSWIRQPPGKGLEWLGVIWGSETTYYNPSLKSRLTISKDTSKNQVSLKMSSLTAADTAVYYCARHYYYGGSYAMDYWGQGTLVTVSS

SEQ ID NO: 4 - protein, 120 aa, Artificial Sequence
  Synthesized heavy chain sequence
QVQLQESGPGLVKPSETLSVTCTVSGVSLPDYGVSWIRQPPGKGLEWLGVIWGSETTYYNPSLKSRLTISKDNSKNQVSLKMSSLTAADTAVYYCARHYYYGGSYAMDYWGQGTLVTVSS

SEQ ID NO: 5 - protein, 120 aa, Artificial Sequence
  Synthesized heavy chain sequence
QVQLQESGPGLVKPSETLSVTCTVSGVSLPDYGVSWIRQPPGKGLEWLGVIWGSETTYYNPSLKSRLTISKDTSKNQVSLKMSSLTAADTAVYYCAKHYYYGGSYAMDYWGQGTLVTVSS

SEQ ID NO: 6 - protein, 120 aa, Artificial Sequence
  Synthesized heavy chain sequence
QVQLQESGPGLVKPSETLSVTCTVSGVSLPDYGVSWIRQPPGKGLEWLGVIWGSETTYYNPSLKSRLTISKDNSKNQVSLKMSSLTAADTAVYYCAKHYYYGGSYAMDYWGQGTLVTVSS

SEQ ID NO: 7 - protein, 120 aa, Artificial Sequence
  Synthesized heavy chain sequence
QVQLQESGPGLVKPSETLSVTCTVSGVSLPDYGVSWIRQPPGKGLEWLGVIWGSETTYYNSALKSRLTISKDNSKNQVSLKMSSLTAADTAVYYCAKHYYYGGSYAMDYWGQGTLVTVSS

SEQ ID NO: 8 - protein, 120 aa, Artificial Sequence
  Synthesized heavy chain sequence
QVQLQESGPGLVKPSETLSVTCTVSGVSLPDYGVSWIRQPPGKGLEWLGVIWGSETTYYNSSLKSRLTISKDNSKNQVSLKMSSLTAADTAVYYCAKHYYYGGSYAMDYWGQGTLVTVSS

SEQ ID NO: 9 - protein, 120 aa, Artificial Sequence
  Synthesized heavy chain sequence
QVQLQESGPGLVKPSETLSLTCTVSGVSLPDYGVSWIRQPPGKGLEWIGVIWGSETTYYNPSLKSRVTISKDNSKNQFSLKLSSVTAADTAVYYCAKHYYYGGSYAMDYWGQGTLVTVSS

SEQ ID NO: 10 - protein, 120 aa, Artificial Sequence
  Synthesized heavy chain sequence
QVQLQESGPGLVKPSETLSLTCTVSGVSLPDYGVSWIRQPPGKGLEWIGVIWGSETTYYNSALKSRVTISKDNSKNQFSLKLSSVTAADTAVYYCAKHYYYGGSYAMDYWGQGTLVTVSS

SEQ ID NO: 11 - protein, 120 aa, Artificial Sequence
  Synthesized heavy chain sequence
EVQLQESGPGLVKPSETLSLTCTVSGVSLPDYGVSWIRQPPGKGLEWLGVIWGSETTYYNSALKSRLTISKDNSKNQVSLKMSSLTAADTAVYYCAKHYYYGGSYAMDYWGQGTLVTVSS

SEQ ID NO: 12 - protein, 120 aa, Artificial Sequence
  Synthesized heavy chain sequence
EVQLQESGPGLVKPSETLSVTCTVSGVSLPDYGVSWIRQPPGKGLEWLGVIWGSETTYYNPSLKSRLTISKDNSKNQVSLKMSSLTAADTAVYYCAKHYYYGGSYAMDYWGQGTLVTVSS

SEQ ID NO: 13 - protein, 120 aa, Artificial Sequence
  Synthesized heavy chain sequence
EVQLQESGPGLVKPSETLSVTCTVSGVSLPDYGVSWIRQPPGKGLEWLGVIWGSETTYYNSALKSRLTISKDNSKNQVSLKMSSLTAADTAVYYCAKHYYYGGSYAMDYWGQGTLVTVSS

SEQ ID NO: 14 - protein, 120 aa, Artificial Sequence
  Synthesized heavy chain sequence
EVQLQESGPGLVKPSETLSLTCTVSGVSLPDYGVSWIRQPPGKGLEWLGVIWGSETTYYNPSLKSRLTISKDNSKNQVSLKMSSLTAADTAVYYCAKHYYYGGSYAMDYWGQGTLVTVSS

SEQ ID NO: 15 - protein, 120 aa, Artificial Sequence
  Synthesized heavy chain sequence
EVKLQESGPGLVAPSQSLSVTCTVSGVSLPDYGVSWIRQPPRKGLEWLGVIWGSETTYYNSALKSRLTIIKDNSKSQVFLKMNSLQTDDTAIYYCAKHYYYGGSYAMDYWGQGTSVTVSS

SEQ ID NO: 16 - protein, 96 aa, Artificial Sequence
  Synthesized light chain sequence
DIQMTQSPSSLSASVGDRVTITCRASQSISSYLNWYQQKPGKAPKLLIYAASSLQSGVPSRFSGSGSGTDFTLTISSLQPEDFATYYCQQSYSTPP

SEQ ID NO: 17 - protein, 107 aa, Artificial Sequence
  Synthesized light chain sequence
DIQMTQSPSSLSASVGDRVTITCRASQDISKYLNWYQQKPGKAPKLLIYHTSRLHSGVPSRFSGSGSGTDFTLTISSLQPEDFATYYCQQGNTLPYTFGQGTKLEIK

SEQ ID NO: 18 - protein, 107 aa, Artificial Sequence
  Synthesized light chain sequence
DIQMTQSPSSLSASVGDRVTITCRASQDISKYLNWYQQKPGKAPKLLIYHTSRLHSGVPSRFSGSGSGTDYTLTISSLQPEDFATYYCQQGATLPYTFGQGTKLEIK

SEQ ID NO: 19 - protein, 107 aa, Artificial Sequence
  Synthesized light chain sequence
DIQMTQSPSSLSASVGDRVTITCRASQDISKYLNWYQQKPGKAVKLLIYHTSRLHSGVPSRFSGSGSGTDYTLTISSLQPEDFATYYCQQGATLPYTFGQGTKLEIK

SEQ ID NO: 20 - protein, 107 aa, Artificial Sequence
  Synthesized light chain sequence
DIQMTQSPSSLSASVGDRVTITCRASQDISKYLNWYQQKPGKAVKLLIYHTSRLHSGVPSRFSGSGSGTDYTLTISSLQPEDFATYFCQQGATLPYTFGQGTKLEIK

SEQ ID NO: 21 - protein, 107 aa, Artificial Sequence
  Synthesized light chain sequence
DIQMTQSPSSLSASVGDRVTITCRASQDISKYLNWYQQKPGKAPKLLIYHTSRLHSGVPSRFSGSGSGTDYTLTISSLQPEDFATYFCQQGATLPYTFGQGTKLEIK

SEQ ID NO: 22 - protein, 107 aa, Artificial Sequence
  Synthesized light chain sequence
DIQMTQSPSSLSASVGDRVTITCRASQDISKYLNWYQQKPGKALKLLIYHTSRLHSGVPSRFSGSGSGTDYTLTISSLQPEDFATYFCQQGATLPYTFGQGTKLEIK

SEQ ID NO: 23 - protein, 107 aa, Artificial Sequence
  Synthesized light chain sequence
DIQMTQSPSSLSASVGDRVTITCRASQDISKYLNWYQQKPGKAVKLLIYHTSRLHSGVPSRFSGSGSGTDYTLTISSLQPEDFATYFCQQGNTLPYTFGQGTKLEIK

SEQ ID NO: 24 - protein, 107 aa, Artificial Sequence
  Synthesized light chain sequence
DIQMTQSPSSLSASVGDRVTITCRASQDISKYLNWYQQKPGKAIKLLIYHTSRLHSGVPSRFSGSGSGTDYTLTISSLQPEDFATYFCQQGATLPYTFGQGTKLEIK

SEQ ID NO: 25 - protein, 107 aa, Artificial Sequence
  Synthesized light chain sequence
DIQMTQTTSSLSASLGDRVTISCRASQDISKYLNWYQQKPDGTVKLLIYHTSRLHSGVPSRFSGSGSGTDYSLTISNLEQEDIATYFCQQGNTLPYTFGGGTKLEIK

SEQ ID NO: 26 - protein, 14 aa, Saccharomyces cerevisiae
NYHLENEVARLKKL

SEQ ID NO: 27 - protein, 126 aa, Artificial Sequence
  Synthesized light chain sequence
NYHLENEVARLKKLGGGGSDIQMTQSPSSLSASVGDRVTITCRASQDISKYLNWYQQKPGKAPKLLIYHTSRLHSGVPSRFSGSGSGTDFTLTISSLQPEDFATYYCQQGNTLPYTFGQGTKLEIK

SEQ ID NO: 28 - protein, 126 aa, Artificial Sequence
  Synthesized light chain sequence
NYHLENEVARLKKLGGGGSDIQMTQSPSSLSASVGDRVTITCRASQDISKYLNWYQQKPGKAPKLLIYHTSRLHSGVPSRFSGSGSGTDYTLTISSLQPEDFATYYCQQGATLPYTFGQGTKLEIK

SEQ ID NO: 29 - protein, 126 aa, Artificial Sequence
  Synthesized light chain sequence
NYHLENEVARLKKLGGGGSDIQMTQSPSSLSASVGDRVTITCRASQDISKYLNWYQQKPGKAVKLLIYHTSRLHSGVPSRFSGSGSGTDYTLTISSLQPEDFATYYCQQGATLPYTFGQGTKLEIK

SEQ ID NO: 30 - protein, 126 aa, Artificial Sequence
  Synthesized light chain sequence
NYHLENEVARLKKLGGGGSDIQMTQSPSSLSASVGDRVTITCRASQDISKYLNWYQQKPGKAVKLLIYHTSRLHSGVPSRFSGSGSGTDYTLTISSLQPEDFATYFCQQGATLPYTFGQGTKLEIK

SEQ ID NO: 31 - protein, 126 aa, Artificial Sequence
  Synthesized light chain sequence
NYHLENEVARLKKLGGGGSDIQMTQSPSSLSASVGDRVTITCRASQDISKYLNWYQQKPGKAPKLLIYHTSRLHSGVPSRFSGSGSGTDYTLTISSLQPEDFATYFCQQGATLPYTFGQGTKLEIK

SEQ ID NO: 32 - protein, 126 aa, Artificial Sequence
  Synthesized light chain sequence
NYHLENEVARLKKLGGGGSDIQMTQSPSSLSASVGDRVTITCRASQDISKYLNWYQQKPGKALKLLIYHTSRLHSGVPSRFSGSGSGTDYTLTISSLQPEDFATYFCQQGATLPYTFGQGTKLEIK

SEQ ID NO: 33 - protein, 126 aa, Artificial Sequence
  Synthesized light chain sequence
NYHLENEVARLKKLGGGGSDIQMTQSPSSLSASVGDRVTITCRASQDISKYLNWYQQKPGKAVKLLIYHTSRLHSGVPSRFSGSGSGTDYTLTISSLQPEDFATYFCQQGNTLPYTFGQGTKLEIK

SEQ ID NO: 34 - protein, 126 aa, Artificial Sequence; identical to SEQ ID NO: 30
  Synthesized light chain sequence

SEQ ID NO: 35 - protein, 126 aa, Artificial Sequence
  Synthesized light chain sequence
NYHLENEVARLKKLGGGGSDIQMTQTTSSLSASLGDRVTISCRASQDISKYLNWYQQKPDGTVKLLIYHTSRLHSGVPSRFSGSGSGTDYSLTISNLEQEDIATYFCQQGNTLPYTFGGGTKLEIK

SEQ ID NO: 36 - protein, 33 aa, Saccharomyces cerevisiae
RMKQLEPKVEELLPKNYHLENEVARLKKLVGER

SEQ ID NO: 37 - protein, 24 aa, Artificial Sequence
  Synthetic construct - yeast transcription factor GCN4 truncated binding peptide with linkers
GGGGSNYHLENEVARLKKLGGGGS

SEQ ID NO: 38 - protein, 13 aa, Artificial Sequence
  synthetic construct
GGGGSDYKDDDDK

SEQ ID NO: 39 - protein, 14 aa, Artificial Sequence
  synthetic construct
GGGGSDYKDDDDKP

SEQ ID NO: 40 - protein, 8 aa, Artificial Sequence
  synthetic construct
DYKDDDDK

SEQ ID NO: 41 - protein, 16 aa, Artificial Sequence
  synthetic construct
TDKDMTITFTNKKDAE

SEQ ID NO: 42 - protein, 13 aa, Artificial Sequence
  Synthetic construct
AHIVMVDAYKPTK

SEQ ID NO: 43 - protein, 28 aa, Artificial Sequence
  Synthetic construct
KVAALKEKVAALKEKVAALKEKVAALKE

SEQ ID NO: 44 - protein, 28 aa, Artificial Sequence
  Synthetic construct
EVAALEKEVAALEKEVAALEKEVAALEK

SEQ ID NO: 45 - protein, 28 aa, Artificial Sequence
  Synthetic construct
EVSALEKEVSALEKEVSALEKEVSALEK

SEQ ID NO: 46 - protein, 28 aa, Artificial Sequence
  Synthetic construct
KVSALKEKVSALKEKVSALKEKVSALKE

SEQ ID NO: 47 - protein, 21 aa, Artificial Sequence
  Synthetic construct
EIAALEKEIAALEKEIAALEK

SEQ ID NO: 48 - protein, 28 aa, Artificial Sequence
  Synthetic construct
EIAALEKEIAALEKEIAALEKEIAALEK

SEQ ID NO: 49 - protein, 21 aa, Artificial Sequence
  Synthetic construct
KIAALKEKIAALKEKIAALKE

SEQ ID NO: 50 - protein, 28 aa, Artificial Sequence
  Synthetic construct
KIAALKEKIAALKEKIAALKEKIAALKE

SEQ ID NO: 51 - protein, 21 aa, Artificial Sequence
  Synthetic construct
EISALEKEISALEKEISALEK

SEQ ID NO: 52 - protein, 28 aa, Artificial Sequence
  Synthetic construct
EISALEKEISALEKEISALEKEISALEK

SEQ ID NO: 53 - protein, 21 aa, Artificial Sequence
  Synthetic construct
KISALKEKISALKEKISALKE

SEQ ID NO: 54 - protein, 28 aa, Artificial Sequence
  Synthetic construct
KISALKEKISALKEKISALKEKISALKE

SEQ ID NO: 55 - protein, 21 aa, Artificial Sequence
  Synthetic construct
EVAALEKEVAALEKEVAALEK

SEQ ID NO: 56 - protein, 21 aa, Artificial Sequence
  Synthetic construct
KVAALKEKVAALKEKVAALKE

SEQ ID NO: 57 - protein, 21 aa, Artificial Sequence
  Synthetic construct
EVSALEKEVSALEKEVSALEK

SEQ ID NO: 58 - protein, 21 aa, Artificial Sequence
  Synthetic construct
KVSALKEKVSALKEKVSALKE

SEQ ID NO: 59 - protein, 17 aa, Artificial Sequence
  Synthetic construct
QIEYLAKQIVDNAIQQA

SEQ ID NO: 60 - protein, 44 aa, Artificial Sequence
  Synthetic construct
SHIQIPPGLTELLQGYTVEVLRQQPPDLVEFAVEYFTRLREARA

SEQ ID NO: 61 - protein, 21 aa, Artificial Sequence
  Synthetic construct
CGQIEYLAKQIVDNAIQQAGC

SEQ ID NO: 62 - protein, 45 aa, Artificial Sequence
  Synthetic construct
CGHIQIPPGLTELLQGYTVEVLRQQPPDLVEFAVEYFTRLREARA

SEQ ID NO: 63 - DNA, 8835 bp, Artificial Sequence
  Synthetic CAR construct
caggtggcacttttcggggaaatgtgcgcggaacccctatttgtttatttttctaaatacattcaaatatgtatccgctcatgagacaataaccctgataaatgcttcaataatattgaaaaaggaagagtatgagtattcaacatttccgtgtcgcccttattcccttttttgcggcattttgccttcctgtttttgctcacccagaaacgctggtgaaagtaaaagatgctgaagatcagttgggtgcacgagtgggttacatcgaactggatctcaacagcggtaagatccttgagagttttcgccccgaagaacgttttccaatgatgagcacttttaaagttctgctatgtggcgcggtattatcccgtattgacgccgggcaagagcaactcggtcgccgcatacactattctcagaatgacttggttgagtactcaccagtcacagaaaagcatcttacggatggcatgacagtaagagaattatgcagtgctgccataaccatgagtgataacactgcggccaacttacttctgacaacgatcggaggaccgaaggagctaaccgcttttttgcacaacatgggggatcatgtaactcgccttgatcgttgggaaccggagctgaatgaagccataccaaacgacgagcgtgacaccacgatgcctgtagcaatggcaacaacgttgcgcaaactattaactggcgaactacttactctagcttcccggcaacaattaatagactggatggaggcggataaagttgcaggaccacttctgcgctcggcccttccggctggctggtttattgctgataaatctggagccggtgagcgtgggtctcgcggtatcattgcagcactggggccagatggtaagccctcccgtatcgtagttatctacacgacggggagtcaggcaactatggatgaacgaaatagacagatcgctgagataggtgcctcactgattaagcattggtaactgtcagaccaagtttactcatatatactttagattgatttaaaacttcatttttaatttaaaaggatctaggtgaagatcctttttgataatctcatgaccaaaatcccttaacgtgagttttcgttccactgagcgtcagaccccgtagaaaagatcaaaggatcttcttgagatcctttttttctgcgcgtaatctgctgcttgcaaacaaaaaaaccaccgctaccagcggtggtttgtttgccggatcaagagctaccaactctttttccgaaggtaactggcttcagcagagcgcagataccaaatactgtccttctagtgtagccgtagttaggccaccacttcaagaactctgtagcaccgcctacatacctcgctctgctaatcctgttaccagtggctgctgccagtggcgataagtcgtgtcttaccgggttggactcaagacgatagttaccggataaggcgcagcggtcgggctgaacggggggttcgtgcacacagcccagcttggagcgaacgacctacaccgaactgagatacctacagcgtgagctatgagaaagcgccacgcttcccgaagggagaaaggcggacaggtatccggtaagcggcagggtcggaacaggagagcgcacgagggagcttccagggggaaacgcctggtatctttatagtcctgtcgggtttcgccacctctgacttgagcgtcgatttttgtgatgctcgtcaggggggcggagcctatggaaaaacgccagcaacgcggcctttttacggttcctggccttttgctggccttttgctcacatgttctttcctgcgttatcccctgattctgtggataaccgtattaccgcctttgagtgagctgataccgctcgccgcagccgaacgaccgagcgcagcgagtcagtgagcgaggaagcggaagagcgcccaatacgcaaaccgcctctccccgcgcgttggccgattcattaatgcagctggcacgacaggtttcccgactggaaagcgggcagtgagcgcaacgcaattaatgtgagttagctcactcattaggcaccccaggctttacactttatgcttccggctcgtatgttgtgtggaattgtgagcggataacaatttcacacaggaaacagctatgaccatgattacgccaagcgcgcaattaaccctcactaaagggaacaaaagctggagctgcaagcttaatgtagtcttatgcaatactcttgtagtcttgcaacatggtaacgatgagttagcaacatgccttacaaggagagaaaaagcaccgtgcatgccgattggtggaagtaaggtggtacgatcgtgccttattaggaaggcaacagacgggtctgacatggattggacgaaccactgaattgccgcattgcagagatattgtatttaagtgcctagctcgatacaataaacgggtctctctggttagaccagatctgagcctgggagctctctggctaactagggaacccactgcttaagcctcaataaagcttgccttgagtgcttcaagtagtgtgtgcccgtctgttgtgtgactctggtaactagagatccctcagacccttttagtcagtgtggaaaatctctagcagtggcgcccgaacagggacctgaaagcgaaagggaaaccagagctctctcgacgcaggactcggcttgctgaagcgcgcacggcaagaggcgaggggcggcgactggtgagtacgccaaaaattttgactagcggaggctagaaggagagagatgggtgcgagagcgtcagtattaagcgggggagaattagatcgcgatgggaaaaaattcggttaaggccagggggaaagaaaaaatataaattaaaacatatagtatgggcaagcagggagctagaacgattcgcagttaatcctggcctgttagaaacatcagaaggctgtagacaaatactgggacagctacaaccatcccttcagacaggatcagaagaacttagatcattatataatacagtagcaaccctctattgtgtgcatcaaaggatagagataaaagacaccaaggaagctttagacaagatagaggaagagcaaaacaaaagtaagaccaccgcacagcaagcggccgctgatcttcagacctggaggaggagatatgagggacaattggagaagtgaattatataaatataaagtagtaaaaattgaaccattaggagtagcacccaccaaggcaaagagaagagtggtgcagagagaaaaaagagcagtgggaataggagctttgttccttgggttcttgggagcagcaggaagcactatgggcgcagcctcaatgacgctgacggtacaggccagacaattattgtctggtatagtgcagcagcagaacaatttgctgagggctattgaggcgcaacagcatctgttgcaactcacagtctggggcatcaagcagctccaggcaagaatcctggctgtggaaagatacctaaaggatcaacagctcctggggatttggggttgctctggaaaactcatttgcaccactgctgtgccttggaatgctagttggagtaataaatctctggaacagattggaatcacacgacctggatggagtgggacagagaaattaacaattacacaagcttaatacactccttaattgaagaatcgcaaaaccagcaagaaaagaatgaacaagaattattggaattagataaatgggcaagtttgtggaattggtttaacataacaaattggctgtggtatataaaattattcataatgatagtaggaggcttggtaggtttaagaatagtttttgctgtactttctatagtgaatagagttaggcagggatattcaccattatcgtttcagacccacctcccaaccccgaggggacccgacaggcccgaaggaatagaagaagaaggtggagagagagacagagacagatccattcgattagtgaacggatctcgacggttaacttttaaaagaaaaggggggattggggggtacagtgcaggggaaagaatagtagacataatagcaacagacatacaaactaaagaattacaaaaacaaattacaaaaattcaaaattttatcgagctttgcaaagatggataaagttttaaacagagaggaatctttgcagctaatggaccttctaggtcttgaaaggagtgcctcgtgaggctccggtgcccgtcagtgggcagagcgcacatcgcccacagtccccgagaagttggggggaggggtcggcaattgaaccggtgcctagagaaggtggcgcggggtaaactgggaaagtgatgtcgtgtactggctccgcctttttcccgagggtgggggagaaccgtatataagtgcagtagtcgccgtgaacgttctttttcgcaacgggtttgccgccagaacacaggtaagtgccgtgtgtggttcccgcgggcctggcctctttacgggttatggcccttgcgtgccttgaattacttccacctggctgcagtacgtgattcttgatcccgagcttcgggttggaagtgggtgggagagttcgaggccttgcgcttaaggagccccttcgcctcgtgcttgagttgaggcctggcctgggcgctggggccgccgcgtgcgaatctggtggcaccttcgcgcctgtctcgctgctttcgataagtctctagccatttaaaatttttgatgacctgctgcgacgctttttttctggcaagatagtcttgtaaatgcgggccaagatctgcacactggtatttcggtttttggggccgcgggcggcgacggggcccgtgcgtcccagcgcacatgttcggcgaggcggggcctgcgagcgcggccaccgagaatcggacgggggtagtctcaagctggccggcctgctctggtgcctggcctcgcgccgccgtgtatcgccccgccctgggcggcaaggctggcccggtcggcaccagttgcgtgagcggaaagatggccgcttcccggccctgctgcagggagctcaaaatggaggacgcggcgctcgggagagcgggcgggtgagtcacccacacaaaggaaaagggcctttccgtcctcagccgtcgcttcatgtgactccacggagtaccgggcgccgtccaggcacctcgattagttctcgagcttttggagtacgtcgtctttaggttggggggaggggttttatgcgatggagtttccccacactgagtgggtggagactgaagttaggccagcttggcacttgatgtaattctccttggaatttgccctttttgagtttggatcttggttcattctcaagcctcagacagtggttcaaagtttttttcttccatttcaggtgtcgtgaggaattcggtaccgcggccgcccggggatccatggccttaccagtgaccgccttgctcctgccgctggccttgctgctccacgccgccaggccggacgccgttgtgacccaggaatccgctctgacctcttctccaggcgaaaccgtgactctgacttgccgtagtagcaccggggctgtgaccacatctaactatgccagttgggtccaggaaaaaccggatcacctgtttactggcctgattggcggcaccaacaatcgcgcaccgggtgtgcccgctcgtttcagcggttccctgattggggacaaggcagcactgactatcaccggcgcccagaccgaagatgaggcgatctatttttgcgtcctgtggtacagcgaccattgggtgttcgggggaggcaccaaactgacagtgctgggcggaggaggaggttcaggaggaggaggtagcgggggaggcggttccgggggaggcggttctgatgtgcagctgcaagaatccgggccaggactggttgcgccttctcagagtctgtcaattacatgtactgttagtggctttctgctgaccgactatggtgtgaactgggttcgtcagagcccaggcaagggtctggagtggctgggagtgatttggggggatggaatcacagactacaatagcgcactgaaatctcggctgagtgttaccaaagataacagcaagtcccaggtcttcctgaagatgaacagcctgcaaagcggcgactccgctcgctattactgcgttaccggactgtttgattattgggggcaggggacaactctgactgtttcctccaccacgacgccagcgccgcgaccaccaacaccggcgcccaccatcgcgtcgcagcccctgtccctgcgcccagaggcgtgccggccagcggcggggggcgcagtgcacacgagggggctggacttcgcctgtgatatctacatctgggcgcccttggccgggacttgtggggtccttctcctgtcactggttatcaccctttactgcaaacggggcagaaagaaactcctgtatatattcaaacaaccatttatgagaccagtacaaactactcaagaggaagatggctgtagctgccgatttccagaagaagaagaaggaggatgtgaactgagagtgaagttcagcaggagcgcagacgcccccgcgtacaagcagggccagaaccagctctataacgagctcaatctaggacgaagagaggagtacgatgttttggacaagagacgtggccgggaccctgagatggggggaaagccgagaaggaagaaccctcaggaaggcctgtacaatgaactgcagaaagataagatggcggaggcctacagtgagattgggatgaaaggcgagcgccggaggggcaaggggcacgatggcctttaccagggtctcagtacagccaccaaggacacctacgacgcccttcacatgcaggccctgccccctcgctaagtcgacaatcaacctctggattacaaaatttgtgaaagattgactggtattcttaactatgttgctccttttacgctatgtggatacgctgctttaatgcctttgtatcatgctattgcttcccgtatggctttcattttctcctccttgtataaatcctggttgctgtctctttatgaggagttgtggcccgttgtcaggcaacgtggcgtggtgtgcactgtgtttgctgacgcaacccccactggttggggcattgccaccacctgtcagctcctttccgggactttcgctttccccctccctattgccacggcggaactcatcgccgcctgccttgcccgctgctggacaggggctcggctgttgggcactgacaattccgtggtgttgtcggggaagctgacgtcctttccatggctgctcgcctgtgttgccacctggattctgcgcgggacgtccttctgctacgtcccttcggccctcaatccagcggaccttccttcccgcggcctgctgccggctctgcggcctcttccgcgtcttcgccttcgccctcagacgagtcggatctccctttgggccgcctccccgcctggaattcgagctcggtacctttaagaccaatgacttacaaggcagctgtagatcttagccactttttaaaagaaaaggggggactggaagggctaattcactcccaacgaagacaagatctgctttttgcttgtactgggtctctctggttagaccagatctgagcctgggagctctctggctaactagggaacccactgcttaagcctcaataaagcttgccttgagtgcttcaagtagtgtgtgcccgtctgttgtgtgactctggtaactagagatccctcagacccttttagtcagtgtggaaaatctctagcagtagtagttcatgtcatcttattattcagtatttataacttgcaaagaaatgaatatcagagagtgagaggaacttgtttattgcagcttataatggttacaaataaagcaatagcatcacaaatttcacaaataaagcatttttttcactgcattctagttgtggtttgtccaaactcatcaatgtatcttatcatgtctggctctagctatcccgcccctaactccgcccagttccgcccattctccgccccatggctgactaattttttttatttatgcagaggccgaggccgcctcggcctctgagctattccagaagtagtgaggaggcttttttggaggcctaggcttttgcgtcgagacgtacccaattcgccctatagtgagtcgtattacgcgcgctcactggccgtcgttttacaacgtcgtgactgggaaaaccctggcgttacccaacttaatcgccttgcagcacatccccctttcgccagctggcgtaatagcgaagaggcccgcaccgatcgcccttcccaacagttgcgcagcctgaatggcgaatggcgcgacgcgccctgtagcggcgcattaagcgcggcgggtgtggtggttacgcgcagcgtgaccgctacacttgccagcgccctagcgcccgctcctttcgctttcttcccttcctttctcgccacgttcgccggctttccccgtcaagctctaaatcgggggctccctttagggttccgatttagtgctttacggcacctcgaccccaaaaaacttgattagggtgatggttcacgtagtgggccatcgccctgatagacggtttttcgccctttgacgttggagtccacgttctttaatagtggactcttgttccaaactggaacaacactcaaccctatctcggtctattcttttgatttataagggattttgccgatttcggcctattggttaaaaaatgagctgatttaacaaaaatttaacgcgaattttaacaaaatattaacgtttacaatttcc

SEQ ID NO: 64 - DNA, 723 bp, Artificial Sequence
  Synthetic construct
atggccttaccagtgaccgccttgctcctgccgctggccttgctgctccacgccgccaggccggaggttgctgccctggagaaggaggtggctgcactggagaaagaggtggccgccctggaaaaagaagtggcagccttggagaaggaaagcaagtatggcccaccttgtccaccttgtcccgatatctacatctgggcgcccttggccgggacttgtggggtccttctcctgtcactggttatcaccctttactgcaaacggggcagaaagaaactcctgtatatattcaaacaaccatttatgagaccagtacaaactactcaagaggaagatggctgtagctgccgatttccagaagaagaagaaggaggatgtgaactgagagtgaagttcagcaggagcgcagacgcccccgcgtacaagcagggccagaaccagctctataacgagctcaatctaggacgaagagaggagtacgatgttttggacaagagacgtggccgggaccctgagatggggggaaagccgagaaggaagaaccctcaggaaggcctgtacaatgaactgcagaaagataagatggcggaggcctacagtgagattgggatgaaaggcgagcgccggaggggcaaggggcacgatggcctttaccagggtctcagtacagccaccaaggacacctacgacgcccttcacatgcaggccctgccccctcgctaa

SEQ ID NO: 65 - DNA, 723 bp, Artificial Sequence
  Synthetic construct
atggccttaccagtgaccgccttgctcctgccgctggccttgctgctccacgccgccaggccgaaagtggcagccctgaaggagaaagttgcggctctcaaagagaaagtggctgcactgaaagaaaaggttgccgccctcaaggaggaaagcaagtatggcccaccttgtccaccttgtcccgatatctacatctgggcgcccttggccgggacttgtggggtccttctcctgtcactggttatcaccctttactgcaaacggggcagaaagaaactcctgtatatattcaaacaaccatttatgagaccagtacaaactactcaagaggaagatggctgtagctgccgatttccagaagaagaagaaggaggatgtgaactgagagtgaagttcagcaggagcgcagacgcccccgcgtacaagcagggccagaaccagctctataacgagctcaatctaggacgaagagaggagtacgatgttttggacaagagacgtggccgggaccctgagatggggggaaagccgagaaggaagaaccctcaggaaggcctgtacaatgaactgcagaaagataagatggcggaggcctacagtgagattgggatgaaaggcgagcgccggaggggcaaggggcacgatggcctttaccagggtctcagtacagccaccaaggacacctacgacgcccttcacatgcaggccctgccccctcgctaa

SEQ ID NO: 66 - protein, 464 aa, Artificial Sequence
  Synthetic CAR construct
DIVMTQTPLTLSVTFGQPASISCKSSQSLLDSDGQTYLNWLLQRPGQSPKRLIYLVSKLDSGVPDRFTGSGSGTDFTLKISRVEAEDLGVYYCWQGTHFPWTFGGGTKLEIKGGGGSGGGGSGGGGSEVQLQQSGAELVKPGASVKLSCTASGFNIKDYYMHWVKQRTEQGLEWIGRIDPEDGETKYAPKFQGKATITADTSSKTAYLQLSSLTSEDTAVYYCARLKGGYWGQGTTLTVSSTTTPAPRPPTPAPTIASQPLSLRPEACRPAAGGAVHTRGLDFACDIYIWAPLAGTCGVLLLSLVITLYCKRGRKKLLYIFKQPFMRPVQTTQEEDGCSCRFPEEEEGGCELRVKFSRSADAPAYKQGQNQLYNELNLGRREEYDVLDKRRGRDPEMGGKPRRKNPQEGLYNELQKDKMAEAYSEIGMKGERRRGKGHDGLYQGLSTATKDTYDALHMQALPPR

SEQ ID NO: 67 - protein, 432 aa, Artificial Sequence
  Synthetic CAR construct
DIVMTQTPLTLSVTFGQPASISCKSSQSLLDSDGQTYLNWLLQRPGQSPKRLIYLVSKLDSGVPDRFTGSGSGTDFTLKISRVEAEDLGVYYCWQGTHFPWTFGGGTKLEIKGGGGSGGGGSGGGGSEVQLQQSGAELVKPGASVKLSCTASGFNIKDYYMHWVKQRTEQGLEWIGRIDPEDGETKYAPKFQGKATITADTSSKTAYLQLSSLTSEDTAVYYCARLKGGYWGQGTTLTVSSESKYGPPCPPCPDIYIWAPLAGTCGVLLLSLVITLYCKRGRKKLLYIFKQPFMRPVQTTQEEDGCSCRFPEEEEGGCELRVKFSRSADAPAYKQGQNQLYNELNLGRREEYDVLDKRRGRDPEMGGKPRRKNPQEGLYNELQKDKMAEAYSEIGMKGERRRGKGHDGLYQGLSTATKDTYDALHMQALPPR

SEQ ID NO: 68 - DNA, 1365 bp, Artificial Sequence
  Synthetic CAR construct
atggccttaccagtgaccgccttgctcctgccgctggccttgctgctccacgccgccaggccggacgccgttgtgacccaggaatccgctctgacctcttctccaggcgaaaccgtgactctgacttgccgtagtagcaccggggctgtgaccacatctaactatgccagttgggtccaggaaaaaccggatcacctgtttactggcctgattggcggcaccaacaatcgcgcaccgggtgtgcccgctcgtttcagcggttccctgattggggacaaggcagcactgactatcaccggcgcccagaccgaagatgaggcgatctatttttgcgtcctgtggtacagcgaccattgggtgttcgggggaggcaccaaactgacagtgctgggcggaggaggaggttcaggaggaggaggtagcgggggaggcggttccgggggaggcggttctgatgtgcagctgcaagaatccgggccaggactggttgcgccttctcagagtctgtcaattacatgtactgttagtggctttctgctgaccgactatggtgtgaactgggttcgtcagagcccaggcaagggtctggagtggctgggagtgatttggggggatggaatcacagactacaatagcgcactgaaatctcggctgagtgttaccaaagataacagcaagtcccaggtcttcctgaagatgaacagcctgcaaagcggcgactccgctcgctattactgcgttaccggactgtttgattattgggggcaggggacaactctgactgtttcctccgaaagcaagtatggcccaccttgtccaagctgtcccgatatctacatctgggcgcccttggccgggacttgtggggtccttctcctgtcactggttatcaccctttactgcaaacggggcagaaagaaactcctgtatatattcaaacaaccatttatgagaccagtacaaactactcaagaggaagatggctgtagctgccgatttccagaagaagaagaaggaggatgtgaactgagagtgaagttcagcaggagcgcagacgcccccgcgtacaagcagggccagaaccagctctataacgagctcaatctaggacgaagagaggagtacgatgttttggacaagagacgtggccgggaccctgagatggggggaaagccgagaaggaagaaccctcaggaaggcctgtacaatgaactgcagaaagataagatggcggaggcctacagtgagattgggatgaaaggcgagcgccggaggggcaaggggcacgatggcctttaccagggtctcagtacagccaccaaggacacctacgacgcccttcacatgcaggccctgccccctcgc

SEQ ID NO: 69 - DNA, 1365 bp, Artificial Sequence
  Synthetic CAR construct
atggccttaccagtgaccgccttgctcctgccgctggccttgctgctccacgccgccaggccggacgccgttgtgacccaggaatccgctctgacctcttctccaggcgaaaccgtgactctgacttgccgtagtagcaccggggctgtgaccacatctaactatgccagttgggtccaggaaaaaccggatcacctgtttactggcctgattggcggcaccaacaatcgcgcaccgggtgtgcccgctcgtttcagcggttccctgattggggacaaggcagcactgactatcaccggcgcccagaccgaagatgaggcgatctatttttgcgtcctgtggtacagcgaccattgggtgttcgggggaggcaccaaactgacagtgctgggcggaggaggaggttcaggaggaggaggtagcgggggaggcggttccgggggaggcggttctgatgtgcagctgcaagaatccgggccaggactggttgcgccttctcagagtctgtcaattacatgtactgttagtggctttctgctgaccgactatggtgtgaactgggttcgtcagagcccaggcaagggtctggagtggctgggagtgatttggggggatggaatcacagactacaatagcgcactgaaatctcggctgagtgttaccaaagataacagcaagtcccaggtcttcctgaagatgaacagcctgcaaagcggcgactccgctcgctattactgcgttaccggactgtttgattattgggggcaggggacaactctgactgtttcctccgaaagcaagtatggcccaccttgtccaccttgtcccgatatctacatctgggcgcccttggccgggacttgtggggtccttctcctgtcactggttatcaccctttactgcaaacggggcagaaagaaactcctgtatatattcaaacaaccatttatgagaccagtacaaactactcaagaggaagatggctgtagctgccgatttccagaagaagaagaaggaggatgtgaactgagagtgaagttcagcaggagcgcagacgcccccgcgtacaagcagggccagaaccagctctataacgagctcaatctaggacgaagagaggagtacgatgttttggacaagagacgtggccgggaccctgagatggggggaaagccgagaaggaagaaccctcaggaaggcctgtacaatgaactgcagaaagataagatggcggaggcctacagtgagattgggatgaaaggcgagcgccggaggggcaaggggcacgatggcctttaccagggtctcagtacagccaccaaggacacctacgacgcccttcacatgcaggccctgccccctcgc

SEQ ID NO: 70 - DNA, 1443 bp, Artificial Sequence
  Synthetic CAR construct
atggccttaccagtgaccgccttgctcctgccgctggccttgctgctccacgccgccaggccgcaggcggtagtcacccaggagccaagtctcacggtgagccccggcggtaccgtcacacttacatgcggaagctctaccggggctgtgaccacaagcaactacgcatcctgggtccagcagaaacccggtcaggctcctcggggcctcattggtgggacaaataacagagccccgggtgttcccgcccgattttctggcagtcttctgggaggaaaggccgctctgacaatatctggcgcacagcccgaagacgaggccgagtactattgcgtgttgtggtatagcgaccactgggtattcggtggaggaacaaagctgacagtgctcggcggtggagggagtggtggcggtggcagcggagggggcggatcacaagtgcaattgcaggagagtggacctggactcgtgaaaccatctgaaacactctccctgacttgtacggtttcagggttcctgctgacagactatggagtaaactggatcaggcagccacccggcaagggcttggagtggattggcgtcatttggggcgacggaatcaccgactataacccatcactcaaatctcgggtgaccatttccaaggataccagtaagaatcagttcagcctgaaactttcatccgtgacagctgcggacaccgccgtgtactactgtgtgacaggactttttgactactggggccaggggaccctggtgacagttagctccaccacgacgccagcgccgcgaccaccaacaccggcgcccaccatcgcgtcgcagcccctgtccctgcgcccagaggcgtgccggccagcggcggggggcgcagtgcacacgagggggctggacttcgcctgtgatatctacatctgggcgcccttggccgggacttgtggggtccttctcctgtcactggttatcaccctttactgcaaacggggcagaaagaaactcctgtatatattcaaacaaccatttatgagaccagtacaaactactcaagaggaagatggctgtagctgccgatttccagaagaagaagaaggaggatgtgaactgagagtgaagttcagcaggagcgcagacgcccccgcgtacaagcagggccagaaccagctctataacgagctcaatctaggacgaagagaggagtacgatgttttggacaagagacgtggccgggaccctgagatggggggaaagccgagaaggaagaaccctcaggaaggcctgtacaatgaactgcagaaagataagatggcggaggcctacagtgagattgggatgaaaggcgagcgccggaggggcaaggggcacgatggcctttaccagggtctcagtacagccaccaaggacacctacgacgcccttcacatgcaggccctgccccctcgc

SEQ ID NO: 71 - DNA, 1443 bp, Artificial Sequence
  Synthetic CAR construct
atggccttaccagtgaccgccttgctcctgccgctggccttgctgctccacgccgccaggccgcaggcggtagtcacccaggagccaagtctcacggtgagccccggcggtaccgtcacacttacatgcggaagctctaccggggctgtgaccacaagcaactacgcatcctgggtccagcagaaacccggtcaggcgccccggggcctcattggtgggacaaataacagagccccgggtgttcccgcccgattttctggcagtcttctgggaggaaaggccgctctgacaatatctggcgcacagcccgaagacgaggccgagtactattgcgtgttgtggtatagcgaccactgggtattcggtggaggaacaaagctgacagtgctcggcggtggagggagtggtggcggtggcagcggagggggcggatcacaagtgcaattgcaggagagtggacctggactcgtgaaaccatctgaaacactctccataacttgtacggtttcagggttcctgctgacagactatggagtaaactgggttaggcagccacccggcaagggcttggagtggctgggcgtcatttggggcgacggaatcaccgactataacccatcactcaaatctcggcttaccgtctccaaggatacgagtaagaatcaggtcagcctgaaaatgtcatccctcacagctgcggacaccgccgtgtactactgtgtgacaggactttttgactactggggccaggggaccctgctcacagttagctccaccacgacgccagcgccgcgaccaccaacaccggcgcccaccatcgcgtcgcagcccctgtccctgcgcccagaggcgtgccggccagcggcggggggcgcagtgcacacgagggggctggacttcgcctgtgatatctacatctgggcgcccttggccgggacttgtggggtccttctcctgtcactggttatcaccctttactgcaaacggggcagaaagaaactcctgtatatattcaaacaaccatttatgagaccagtacaaactactcaagaggaagatggctgtagctgccgatttccagaagaagaagaaggaggatgtgaactgagagtgaagttcagcaggagcgcagacgcccccgcgtacaagcagggccagaaccagctctataacgagctcaatctaggacgaagagaggagtacgatgttttggacaagagacgtggccgggaccctgagatggggggaaagccgagaaggaagaaccctcaggaaggcctgtacaatgaactgcagaaagataagatggcggaggcctacagtgagattgggatgaaaggcgagcgccggaggggcaaggggcacgatggcctttaccagggtctcagtacagccaccaaggacacctacgacgcccttcacatgcaggccctgccccctcgc

SEQ ID NO: 72 - DNA, 1443 bp, Artificial Sequence
  Synthetic CAR construct
atggccttaccagtgaccgccttgctcctgccgctggccttgctgctccacgccgccaggccgcaggcggtagtcacccaggagccaagtctcacggtgagccccggcggtaccgtcacacttacatgcggaagctctaccggggctgtgaccacaagcaactacgcatcctgggtccagcagaaacccggacaagcgttccggggcctcattggtgggacaaataacagagccccgggtgttcccgcccgattttctggcagtcttctgggaggaaaggccgctctgacaatatctggcgcacagcccgaagacgaggccgagtactattgcgtgttgtggtatagcgaccactgggtattcggtggaggaacaaagctgacagtgctcggcggtggagggagtggtggcggtggcagcggagggggcggatcacaagtgcaattgcaggagagtggacctggactcgtgaaaccatctgaaacactctccctcacttgtacggtttcagggttcctgctgacagactatggagtaaactggattaggcagccacccggcaagggcttggagtggatcggcgtcatttggggcgacggaatcaccgactataacccatcactcaaatctcgggtcaccatctccaaggataccagtaagaatcagttcagcctgaaactgtcatccgtcacagctgcggacaccgccgtgtactactgtgtgacaggactttttgactactggggccaggggaccctggtaacagttagctccaccacgacgccagcgccgcgaccaccaacaccggcgcccaccatcgcgtcgcagcccctgtccctgcgcccagaggcgtgccggccagcggcggggggcgcagtgcacacgagggggctggacttcgcctgtgatatctacatctgggcgcccttggccgggacttgtggggtccttctcctgtcactggttatcaccctttactgcaaacggggcagaaagaaactcctgtatatattcaaacaaccatttatgagaccagtacaaactactcaagaggaagatggctgtagctgccgatttccagaagaagaagaaggaggatgtgaactgagagtgaagttcagcaggagcgcagacgcccccgcgtacaagcagggccagaaccagctctataacgagctcaatctaggacgaagagaggagtacgatgttttggacaagagacgtggccgggaccctgagatggggggaaagccgagaaggaagaaccctcaggaaggcctgtacaatgaactgcagaaagataagatggcggaggcctacagtgagattgggatgaaaggcgagcgccggaggggcaaggggcacgatggcctttaccagggtctcagtacagccaccaaggacacctacgacgcccttcacatgcaggccctgccccctcgc

SEQ ID NO: 73 - DNA, 1443 bp, Artificial Sequence
  Synthetic CAR construct
atggccttaccagtgaccgccttgctcctgccgctggccttgctgctccacgccgccaggccgcaggcggtagtcacccaggagccaagtctcacggtgagccccggcggtaccgtcacacttacatgcggaagctctaccggggctgtgaccacaagcaactacgcatcctgggtccagcagaaacccggtcaggcattccggggcctcattggtgggacaaataacagagccccgggtgttcccgcccgattttctggcagtcttctgggaggaaaggccgctctgacaatatctggcgcacagcccgaagacgaggccgagtactattgcgtgttgtggtatagcgaccactgggtattcggtggaggaacaaagctgacagtgctcggcggtggagggagtggtggcggtggcagcggagggggcggatcacaagtgcaattgcaggagagtggacctggactcgtgaaaccatctgaaacactctccataacttgtacggtttcagggttcctgctgacagactatggagtaaactgggtcaggcagccacccggcaagggcttggagtggctcggcgtcatttggggcgacggaatcaccgactataacccatcactcaaatctcggttgaccgtgtccaaggataccagtaagaatcaggtcagcctgaaaatgtcatccctgacagctgcggacaccgccgtgtactactgtgtgacaggactttttgactactggggccaggggaccctgttgacagttagctccaccacgacgccagcgccgcgaccaccaacaccggcgcccaccatcgcgtcgcagcccctgtccctgcgcccagaggcgtgccggccagcggcggggggcgcagtgcacacgagggggctggacttcgcctgtgatatctacatctgggcgcccttggccgggacttgtggggtccttctcctgtcactggttatcaccctttactgcaaacggggcagaaagaaactcctgtatatattcaaacaaccatttatgagaccagtacaaactactcaagaggaagatggctgtagctgccgatttccagaagaagaagaaggaggatgtgaactgagagtgaagttcagcaggagcgcagacgcccccgcgtacaagcagggccagaaccagctctataacgagctcaatctaggacgaagagaggagtacgatgttttggacaagagacgtggccgggaccctgagatggggggaaagccgagaaggaagaaccctcaggaaggcctgtacaatgaactgcagaaagataagatggcggaggcctacagtgagattgggatgaaaggcgagcgccggaggggcaaggggcacgatggcctttaccagggtctcagtacagccaccaaggacacctacgacgcccttcacatgcaggccctgccccctcgc

SEQ ID NO: 74 - DNA, 1443 bp, Artificial Sequence
  Synthetic CAR construct
atggccttaccagtgaccgccttgctcctgccgctggccttgctgctccacgccgccaggccgcaggcggtagtcacccaggagccaagtctcacggtgagccccggcggtaccgtcacacttacatgcggaagctctaccggggctgtgaccacaagcaactacgcatcctgggtccagcagaaacccgatcacctgttccggggcctcattggtgggacaaataacagagccccgggtgttcccgcccgattttctggcagtcttctgggaggaaaggccgctctgacaatatctggcgcacagcccgaagacgaggccgagtactattgcgtgttgtggtatagcgaccactgggtattcggtggaggaacaaagctgacagtgctcggcggtggagggagtggtggcggtggcagcggagggggcggatcacaagtgcaattgcaggagagtggacctggactcgtgaaaccatctgaaacactctcccttacttgtacggtttcagggttcctgctgacagactatggagtaaactggatcaggcagccacccggcaagggcttggagtggatcggcgtcatttggggcgacggaatcaccgactataacccatcactcaaatctcgggtcaccatctccaaggatacgagtaagaatcagttcagcctgaaactctcatccgttacagctgcggacaccgccgtgtactactgtgtgacaggactttttgactactggggccaggggaccctggtaacagttagctccaccacgacgccagcgccgcgaccaccaacaccggcgcccaccatcgcgtcgcagcccctgtccctgcgcccagaggcgtgccggccagcggcggggggcgcagtgcacacgagggggctggacttcgcctgtgatatctacatctgggcgcccttggccgggacttgtggggtccttctcctgtcactggttatcaccctttactgcaaacggggcagaaagaaactcctgtatatattcaaacaaccatttatgagaccagtacaaactactcaagaggaagatggctgtagctgccgatttccagaagaagaagaaggaggatgtgaactgagagtgaagttcagcaggagcgcagacgcccccgcgtacaagcagggccagaaccagctctataacgagctcaatctaggacgaagagaggagtacgatgttttggacaagagacgtggccgggaccctgagatggggggaaagccgagaaggaagaaccctcaggaaggcctgtacaatgaactgcagaaagataagatggcggaggcctacagtgagattgggatgaaaggcgagcgccggaggggcaaggggcacgatggcctttaccagggtctcagtacagccaccaaggacacctacgacgcccttcacatgcaggccctgccccctcgc

SEQ ID NO: 75 - DNA, 1443 bp, Artificial Sequence
  Synthetic CAR construct
atggccttaccagtgaccgccttgctcctgccgctggccttgctgctccacgccgccaggccgcaggcggtagtcacccaggagccaagtctcacggtgagccccggcggtaccgtcacacttacatgcggaagctctaccggggctgtgaccacaagcaactacgcatcctgggtccagcagaaacccgaccatctgtttcggggcctcattggtgggacaaataacagagccccgggtgttcccgcccgattttctggcagtcttctgggaggaaaggccgctctgacaatatctggcgcacagcccgaagacgaggccgagtactattgcgtgttgtggtatagcgaccactgggtattcggtggaggaacaaagctgacagtgctcggcggtggagggagtggtggcggtggcagcggagggggcggatcacaagtgcaattgcaggagagtggacctggactcgtgaaaccatctgaaacactctccattacttgtacggtttcagggttcctgctgacagactatggagtaaactgggtgaggcagccacccggcaagggcttggagtggctcggcgtcatttggggcgacggaatcaccgactataacccatcactcaaatctcggttgaccgtgtccaaggataccagtaagaatcaggtgagcctgaaaatgtcatccctgacagctgcggacaccgccgtgtactactgtgtgacaggactttttgactactggggccaggggaccctgctgacagttagctccaccacgacgccagcgccgcgaccaccaacaccggcgcccaccatcgcgtcgcagcccctgtccctgcgcccagaggcgtgccggccagcggcggggggcgcagtgcacacgagggggctggacttcgcctgtgatatctacatctgggcgcccttggccgggacttgtggggtccttctcctgtcactggttatcaccctttactgcaaacggggcagaaagaaactcctgtatatattcaaacaaccatttatgagaccagtacaaactactcaagaggaagatggctgtagctgccgatttccagaagaagaagaaggaggatgtgaactgagagtgaagttcagcaggagcgcagacgcccccgcgtacaagcagggccagaaccagctctataacgagctcaatctaggacgaagagaggagtacgatgttttggacaagagacgtggccgggaccctgagatggggggaaagccgagaaggaagaaccctcaggaaggcctgtacaatgaactgcagaaagataagatggcggaggcctacagtgagattgggatgaaaggcgagcgccggaggggcaaggggcacgatggcctttaccagggtctcagtacagccaccaaggacacctacgacgcccttcacatgcaggccctgccccctcgc

SEQ ID NO: 76 - DNA, 1461 bp, Artificial Sequence
  Synthetic CAR construct
atggccttaccagtgaccgccttgctcctgccgctggccttgctgctccacgccgccaggccggacgccgttgtgacccaggaatccgctctgacctcttctccaggcgaaaccgtgactctgacttgccgtagtagcaccggggctgtgaccacatctaactatgccagttgggtccaggaaaaaccggatcacctgtttactggcctgattggcggcaccaacaatcgcgcaccgggtgtgcccgctcgtttcagcggttccctgattggggacaaggcagcactgactatcaccggcgcccagaccgaagatgaggcgatctatttttgcgtcctgtggtacagcgaccattgggtgttcgggggaggcaccaaactgacagtgctgggcggaggaggaggttcaggaggaggaggtagcgggggaggcggttccgggggaggcggttctgatgtgcagctgcaagaatccgggccaggactggttgcgccttctcagagtctgtcaattacatgtactgttagtggctttctgctgaccgactatggtgtgaactgggttcgtcagagcccaggcaagggtctggagtggctgggagtgatttggggggatggaatcacagactacaatagcgcactgaaatctcggctgagtgttaccaaagataacagcaagtcccaggtcttcctgaagatgaacagcctgcaaagcggcgactccgctcgctattactgcgttaccggactgtttgattattgggggcaggggacaactctgactgtttcctccaccacgacgccagcgccgcgaccaccaacaccggcgcccaccatcgcgtcgcagcccctgtccctgcgcccagaggcgtgccggccagcggcggggggcgcagtgcacacgagggggctggacttcgcctgtgatatctacatctgggcgcccttggccgggacttgtggggtccttctcctgtcactggttatcaccctttactgcaaacggggcagaaagaaactcctgtatatattcaaacaaccatttatgagaccagtacaaactactcaagaggaagatggctgtagctgccgatttccagaagaagaagaaggaggatgtgaactgagagtgaagttcagcaggagcgcagacgcccccgcgtacaagcagggccagaaccagctctataacgagctcaatctaggacgaagagaggagtacgatgttttggacaagagacgtggccgggaccctgagatggggggaaagccgagaaggaagaaccctcaggaaggcctgtacaatgaactgcagaaagataagatggcggaggcctacagtgagattgggatgaaaggcgagcgccggaggggcaaggggcacgatggcctttaccagggtctcagtacagccaccaaggacacctacgacgcccttcacatgcaggccctgccccctcgc

SEQ ID NO: 77 - DNA, 1329 bp, Artificial Sequence
  Synthetic CAR construct
atggccttaccagtgaccgccttgctcctgccgctggccttgctgctccacgccgccaggccggacgccgttgtgacccaggaatccgctctgacctcttctccaggcgaaaccgtgactctgacttgccgtagtagcaccggggctgtgaccacatctaactatgccagttgggtccaggaaaaaccggatcacctgtttactggcctgattggcggcaccaacaatcgcgcaccgggtgtgcccgctcgtttcagcggttccctgattggggacaaggcagcactgactatcaccggcgcccagaccgaagatgaggcgatctatttttgcgtcctgtggtacagcgaccattgggtgttcgggggaggcaccaaactgacagtgctgggcggaggaggaggttcaggaggaggaggtagcgggggaggcggttccgggggaggcggttctgatgtgcagctgcaagaatccgggccaggactggttgcgccttctcagagtctgtcaattacatgtactgttagtggctttctgctgaccgactatggtgtgaactgggttcgtcagagcccaggcaagggtctggagtggctgggagtgatttggggggatggaatcacagactacaatagcgcactgaaatctcggctgagtgttaccaaagataacagcaagtcccaggtcttcctgaagatgaacagcctgcaaagcggcgactccgctcgctattactgcgttaccggactgtttgattattgggggcaggggacaactctgactgtttcctccgatatctacatctgggcgcccttggccgggacttgtggggtccttctcctgtcactggttatcaccctttactgcaaacggggcagaaagaaactcctgtatatattcaaacaaccatttatgagaccagtacaaactactcaagaggaagatggctgtagctgccgatttccagaagaagaagaaggaggatgtgaactgagagtgaagttcagcaggagcgcagacgcccccgcgtacaagcagggccagaaccagctctataacgagctcaatctaggacgaagagaggagtacgatgttttggacaagagacgtggccgggaccctgagatggggggaaagccgagaaggaagaaccctcaggaaggcctgtacaatgaactgcagaaagataagatggcggaggcctacagtgagattgggatgaaaggcgagcgccggaggggcaaggggcacgatggcctttaccagggtctcagtacagccaccaaggacacctacgacgcccttcacatgcaggccctgccccctcgc

SEQ ID NO: 78 - DNA, 1374 bp, Artificial Sequence
  Synthetic CAR construct
atgggtgtccctacccagctcctgggactgctcctgctgtggatcaccgacgccatctgcgacgccgttgtgacccaggaatccgctctgacctcttctccaggcgaaaccgtgactctgacttgccgtagtagcaccggggctgtgaccacatctaactatgccagttgggtccaggaaaaaccggatcacctgtttactggcctgattggcggcaccaacaatcgcgcaccgggtgtgcccgctcgtttcagcggttccctgattggggacaaggcagcactgactatcaccggcgcccagaccgaagatgaggcgatctatttttgcgtcctgtggtacagcgaccattgggtgttcgggggaggcaccaaactgacagtgctgggcggaggaggaggttcaggaggaggaggtagcgggggaggcggttccgggggaggcggttctgatgtgcagctgcaagaatccgggccaggactggttgcgccttctcagagtctgtcaattacatgtactgttagtggctttctgctgaccgactatggtgtgaactgggttcgtcagagcccaggcaagggtctggagtggctgggagtgatttggggggatggaatcacagactacaatagcgcactgaaatctcggctgagtgttaccaaagataacagcaagtcccaggtcttcctgaagatgaattccctgcaaagcggcgactccgctcgctattactgcgttaccggactgtttgattattgggggcaggggacaactctgactgtttcctccgaaagcaagtatggcccaccttgtccaccttgtcccatttacatctgggcacccttggccggaatctgcgtggcccttctgctgtccttgatcatcactctcatctgcaaatggatcaggaaaaaattcccccacatattcaagcaaccatttaagaagaccactggagcagctcaagaggaagatgcttgtagctgccgatgtccacaggaagaagaaggaggaggaggaggctatgagctgagagccaagttcagcagatccgccgagacagccgccaacctgcaggatcccaaccagctgttcaacgagctgaacctgggcagacgggaggaattcgacgtgctggaaaagaagagagccagggaccccgagatgggcggcaagcagcagagaagaagaaaccctcaggaaggcgtctacaacgccctgcagaaagacaagatggccgaggcctacagcgagatcggcaccaagggcgagagaagaaggggcaagggccacgatggcctgttccagggcctgtccaccgccaccaaggacaccttcgacgccctgcacatgcagaccctggcccccagatga

SEQ ID NO: 79 - DNA, 1374 bp, Artificial Sequence
  Synthetic CAR construct
atgggtgtccctacccagctcctgggactgctcctgctgtggatcaccgacgccatctgcgacgccgttgtgacccaggaatccgctctgacctcttctccaggcgaaaccgtgactctgacttgccgtagtagcaccggggctgtgaccacatctaactatgccagttgggtccaggaaaaaccggatcacctgtttactggcctgattggcggcaccaacaatcgcgcaccgggtgtgcccgctcgtttcagcggttccctgattggggacaaggcagcactgactatcaccggcgcccagaccgaagatgaggcgatctatttttgcgtcctgtggtacagcgaccattgggtgttcgggggaggcaccaaactgacagtgctgggcggaggaggaggttcaggaggaggaggtagcgggggaggcggttccgggggaggcggttctgatgtgcagctgcaagaatccgggccaggactggttgcgccttctcagagtctgtcaattacatgtactgttagtggctttctgctgaccgactatggtgtgaactgggttcgtcagagcccaggcaagggtctggagtggctgggagtgatttggggggatggaatcacagactacaatagcgcactgaaatctcggctgagtgttaccaaagataacagcaagtcccaggtcttcctgaagatgaattccctgcaaagcggcgactccgctcgctattactgcgttaccggactgtttgattattgggggcaggggacaactctgactgtttcctccgaaagcaagtatggcccaccttgtccaccttgtcccatttacatctgggcacccttggccggaatctgcgtggcccttctgctgtccttgatcatcactctcatctgcaaatggatcaggaaaaaattcccccacatattcaagcaaccatttaagaagaccactggagcagctcaagaggaagatgcttgtagctgccgatgtccacaggaagaagaaggaggaggaggaggctatgagctgagagcaaaattcagcaggagtgcagagactgctgccaacctgcaggaccccaaccagctctacaatgagctcaatctagggcgaagagaggaatatgacgtcttggagaagaagcgggctcgggatccagagatgggaggcaaacagcagaggaggaggaacccccaggaaggcgtatacaatgcactgcagaaagacaagatggcagaagcctacagtgagatcggcacaaaaggcgagaggcggagaggcaaggggcacgatggcctttaccagggtctcagcactgccaccaaggacacctatgatgccctgcatatgcagaccctggcccctcgctaa

SEQ ID NO: 80 - DNA, 1467 bp, Artificial Sequence
  Synthetic CAR construct
atgggtgtccctacccagctcctgggactgctcctgctgtggatcaccgacgccatctgcgacgccgttgtgacccaggaatccgctctgacctcttctccaggcgaaaccgtgactctgacttgccgtagtagcaccggggctgtgaccacatctaactatgccagttgggtccaggaaaaaccggatcacctgtttactggcctgattggcggcaccaacaatcgcgcaccgggtgtgcccgctcgtttcagcggttccctgattggggacaaggcagcactgactatcaccggcgcccagaccgaagatgaggcgatctatttttgcgtcctgtggtacagcgaccattgggtgttcgggggaggcaccaaactgacagtgctgggcggaggaggaggttcaggaggaggaggtagcgggggaggcggttccgggggaggcggttctgatgtgcagctgcaagaatccgggccaggactggttgcgccttctcagagtctgtcaattacatgtactgttagtggctttctgctgaccgactatggtgtgaactgggttcgtcagagcccaggcaagggtctggagtggctgggagtgatttggggggatggaatcacagactacaatagcgcactgaaatctcggctgagtgttaccaaagataacagcaagtcccaggtcttcctgaagatgaattccctgcaaagcggcgactccgctcgctattactgcgttaccggactgtttgattattgggggcaggggacaactctgactgtttcctccactactaccaagccagtgctgcgaactccctcacctgtgcaccctaccgggacatctcagccccagagaccagaagattgtcggccccgtggctcagtgaaggggaccggattggacttcgcctgtgatatttacatctgggcacccttggccggaatctgcgtggcccttctgctgtccttgatcatcactctcatctgcaaatggatcaggaaaaaattcccccacatattcaagcaaccatttaagaagaccactggagcagctcaagaggaagatgcttgtagctgccgatgtccacaggaagaagaaggaggaggaggaggctatgagctgagagccaagttcagcagatccgccgagacagccgccaacctgcaggatcccaaccagctgttcaacgagctgaacctgggcagacgggaggaattcgacgtgctggaaaagaagagagccagggaccccgagatgggcggcaagcagcagagaagaagaaaccctcaggaaggcgtctacaacgccctgcagaaagacaagatggccgaggcctacagcgagatcggcaccaagggcgagagaagaaggggcaagggccacgatggcctgttccagggcctgtccaccgccaccaaggacaccttcgacgccctgcacatgcagaccctggcccccagatga

SEQ ID NO: 81 - DNA, 1467 bp, Artificial Sequence
  Synthetic CAR construct
atgggtgtccctacccagctcctgggactgctcctgctgtggatcaccgacgccatctgcgacgccgttgtgacccaggaatccgctctgacctcttctccaggcgaaaccgtgactctgacttgccgtagtagcaccggggctgtgaccacatctaactatgccagttgggtccaggaaaaaccggatcacctgtttactggcctgattggcggcaccaacaatcgcgcaccgggtgtgcccgctcgtttcagcggttccctgattggggacaaggcagcactgactatcaccggcgcccagaccgaagatgaggcgatctatttttgcgtcctgtggtacagcgaccattgggtgttcgggggaggcaccaaactgacagtgctgggcggaggaggaggttcaggaggaggaggtagcgggggaggcggttccgggggaggcggttctgatgtgcagctgcaagaatccgggccaggactggttgcgccttctcagagtctgtcaattacatgtactgttagtggctttctgctgaccgactatggtgtgaactgggttcgtcagagcccaggcaagggtctggagtggctgggagtgatttggggggatggaatcacagactacaatagcgcactgaaatctcggctgagtgttaccaaagataacagcaagtcccaggtcttcctgaagatgaattccctgcaaagcggcgactccgctcgctattactgcgttaccggactgtttgattattgggggcaggggacaactctgactgtttcctccactactaccaagccagtgctgcgaactccctcacctgtgcaccctaccgggacatctcagccccagagaccagaagattgtcggccccgtggctcagtgaaggggaccggattggacttcgcctgtgatatttacatctgggcacccttggccggaatctgcgtggcccttctgctgtccttgatcatcactctcatctgcaaatggatcaggaaaaaattcccccacatattcaagcaaccatttaagaagaccactggagcagctcaagaggaagatgcttgtagctgccgatgtccacaggaagaagaaggaggaggaggaggctatgagctgagagcaaaattcagcaggagtgcagagactgctgccaacctgcaggaccccaaccagctctacaatgagctcaatctagggcgaagagaggaatatgacgtcttggagaagaagcgggctcgggatccagagatgggaggcaaacagcagaggaggaggaacccccaggaaggcgtatacaatgcactgcagaaagacaagatggcagaagcctacagtgagatcggcacaaaaggcgagaggcggagaggcaaggggcacgatggcctttaccagggtctcagcactgccaccaaggacacctatgatgccctgcatatgcagaccctggcccctcgctaa

SEQ ID NO: 82 - DNA, 1371 bp, Artificial Sequence
  Synthetic CAR construct
atgggtgtccctacccagctcctgggactgctcctgctgtggatcaccgacgccatctgcgacgccgttgtgacccaggaatccgctctgacctcttctccaggcgaaaccgtgactctgacttgccgtagtagcaccggggctgtgaccacatctaactatgccagttgggtccaggaaaaaccggatcacctgtttactggcctgattggcggcaccaacaatcgcgcaccgggtgtgcccgctcgtttcagcggttccctgattggggacaaggcagcactgactatcaccggcgcccagaccgaagatgaggcgatctatttttgcgtcctgtggtacagcgaccattgggtgttcgggggaggcaccaaactgacagtgctgggcggaggaggaggttcaggaggaggaggtagcgggggaggcggttccgggggaggcggttctgatgtgcagctgcaagaatccgggccaggactggttgcgccttctcagagtctgtcaattacatgtactgttagtggctttctgctgaccgactatggtgtgaactgggttcgtcagagcccaggcaagggtctggagtggctgggagtgatttggggggatggaatcacagactacaatagcgcactgaaatctcggctgagtgttaccaaagataacagcaagtcccaggtcttcctgaagatgaacagcctgcaaagcggcgactccgctcgctattactgcgttaccggactgtttgattattgggggcaggggacaactctgactgtttcctccgaaagcaagtatggcccaccttgtccaccttgtcccttctgggccctggtggtggtggccggcgtgctgttctgttacggcctgctggtcacagtggccctgtgcgtgatctggaccaacagcagaagaaacagaggcggccagagcgactacatgaacatgacccccagaaggccaggcctgaccagaaagccctaccagccctacgcccctgccagagacttcgccgcctacagacccagagccaagttcagcagatccgccgagacagccgccaacctgcaggatcccaaccagctgttcaacgagctgaacctgggcagacgggaggaattcgacgtgctggaaaagaagagagccagggaccccgagatgggcggcaagcagcagagaagaagaaaccctcaggaaggcgtctacaacgccctgcagaaagacaagatggccgaggcctacagcgagatcggcaccaagggcgagagaagaaggggcaagggccacgatggcctgttccagggcctgtccaccgccaccaaggacaccttcgacgccctgcacatgcagaccctggcccccagatga

SEQ ID NO: 83 - DNA, 1371 bp, Artificial Sequence
  Synthetic CAR construct
atgggtgtccctacccagctcctgggactgctcctgctgtggatcaccgacgccatctgcgatgtgcagctgcaagaatccgggccaggactggttgcgccttctcagagtctgtcaattacatgtactgttagtggctttctgctgaccgactatggtgtgaactgggttcgtcagagcccaggcaagggtctggagtggctgggagtgatttggggggatggaatcacagactacaatagcgcactgaaatctcggctgagtgttaccaaagataacagcaagtcccaggtcttcctgaagatgaacagcctgcaaagcggcgactccgctcgctattactgcgttaccggactgtttgattattgggggcaggggacaactctgactgtttcctccggaggaggaggttcaggaggaggaggtagcgggggaggcggttccgggggaggcggttctgacgccgttgtgacccaggaatccgctctgacctcttctccaggcgaaaccgtgactctgacttgccgtagtagcaccggggctgtgaccacatctaactatgccagttgggtccaggaaaaaccggatcacctgtttactggcctgattggcggcaccaacaatcgcgcaccgggtgtgcccgctcgtttcagcggttccctgattggggacaaggcagcactgactatcaccggcgcccagaccgaagatgaggcgatctatttttgcgtcctgtggtacagcgaccattgggtgttcgggggaggcaccaaactgacagtgctgggcgaaagcaagtatggcccaccttgtccaccttgtcccttctgggccctggtggtggtggccggcgtgctgttctgttacggcctgctggtcacagtggccctgtgcgtgatctggaccaacagcagaagaaacagaggcggccagagcgactacatgaacatgacccccagaaggccaggcctgaccagaaagccctaccagccctacgcccctgccagagacttcgccgcctacagacccagagccaagttcagcagatccgccgagacagccgccaacctgcaggatcccaaccagctgttcaacgagctgaacctgggcagacgggaggaattcgacgtgctggaaaagaagagagccagggaccccgagatgggcggcaagcagcagagaagaagaaaccctcaggaaggcgtctacaacgccctgcagaaagacaagatggccgaggcctacagcgagatcggcaccaagggcgagagaagaaggggcaagggccacgatggcctgttccagggcctgtccaccgccaccaaggacaccttcgacgccctgcacatgcagaccctggcccccagatga

SEQ ID NO: 84 - DNA, 1365 bp, Artificial Sequence
  Synthetic CAR construct
atgggtgtccctacccagctcctgggactgctcctgctgtggatcaccgacgccatctgcgacgccgttgtgacccaggaatccgctctgacctcttctccaggcgaaaccgtgactctgacttgccgtagtagcaccggggctgtgaccacatctaactatgccagttgggtccaggaaaaaccggatcacctgtttactggcctgattggcggcaccaacaatcgcgcaccgggtgtgcccgctcgtttcagcggttccctgattggggacaaggcagcactgactatcaccggcgcccagaccgaagatgaggcgatctatttttgcgtcctgtggtacagcgaccattgggtgttcgggggaggcaccaaactgacagtgctgggcggaggaggaggttcaggaggaggaggtagcgggggaggcggttccgggggaggcggttctgatgtgcagctgcaagaatccgggccaggactggttgcgccttctcagagtctgtcaattacatgtactgttagtggctttctgctgaccgactatggtgtgaactgggttcgtcagagcccaggcaagggtctggagtggctgggagtgatttggggggatggaatcacagactacaatagcgcactgaaatctcggctgagtgttaccaaagataacagcaagtcccaggtcttcctgaagatgaacagcctgcaaagcggcgactccgctcgctattactgcgttaccggactgtttgattattgggggcaggggacaactctgactgtttcctccgaaagcaagtatggcccaccttgtccaccttgtcccgatatctacatctgggcgcccttggccgggacttgtggggtccttctcctgtcactggttatcaccctttactgcaaacggggcagaaagaaactcctgtatatattcaaacaaccatttatgagaccagtacaaactactcaagaggaagatggctgtagctgccgatttccagaagaagaagaaggaggatgtgaactgagagtgaagttcagcaggagcgcagacgcccccgcgtacaagcagggccagaaccagctctataacgagctcaatctaggacgaagagaggagtacgatgttttggacaagagacgtggccgggaccctgagatggggggaaagccgagaaggaagaaccctcaggaaggcctgtacaatgaactgcagaaagataagatggcggaggcctacagtgagattgggatgaaaggcgagcgccggaggggcaaggggcacgatggcctttaccagggtctcagtacagccaccaaggacacctacgacgcccttcacatgcaggccctgccccctcgctaa

SEQ ID NO: 85 - DNA, 326 bp, Artificial Sequence
  Synthetic CAR construct
  misc_feature (27)..(27): n is a, c, g, or t
  misc_feature (41)..(42): n is a, c, g, or t
  misc_feature (123)..(123): n is a, c, g, or t
  misc_feature (141)..(141): n is a, c, g, or t
  misc_feature (152)..(152): n is a, c, g, or t
  misc_feature (159)..(159): n is a, c, g, or t
  misc_feature (262)..(262): n is a, c, g, or t
  misc_feature (264)..(265): n is a, c, g, or t
  misc_feature (286)..(286): n is a, c, g, or t
  misc_feature (289)..(289): n is a, c, g, or t
davvtsatssgtvttcrsstgavttsnyaswvkdhtgggtnnragvarsgsgdkaattgatdaycvwysdhwvgggtktvgggggsggggsggggsggggsdvsggvassstctvsgtdygvnwvrsgkgwgvwgdgtdynsaksrsvtkdnsksvkmnssgdsaryycvtgdywggtttvsstttartatassracraaggavhtrgdacdywaagtcgvsvtyckrgrkkykmrvttdgcscrggcrvksrsadaaykgnynngrrydvdkrrgrdmggkrrkngynkdkmaaysgmkgrrrgkghdgygstatkdtydahmar

SEQ ID NO: 86 - DNA, 304 bp, Artificial Sequence
  Synthetic CAR construct
  misc_feature (27)..(27): n is a, c, g, or t
  misc_feature (41)..(42): n is a, c, g, or t
  misc_feature (123)..(123): n is a, c, g, or t
  misc_feature (141)..(141): n is a, c, g, or t
  misc_feature (152)..(152): n is a, c, g, or t
  misc_feature (159)..(159): n is a, c, g, or t
  misc_feature (240)..(240): n is a, c, g, or t
  misc_feature (242)..(243): n is a, c, g, or t
  misc_feature (264)..(264): n is a, c, g, or t
  misc_feature (267)..(267): n is a, c, g, or t
davvtsatssgtvttcrsstgavttsnyaswvkdhtgggtnnragvarsgsgdkaattgatdaycvwysdhwvgggtktvgggggsggggsggggsggggsdvsggvassstctvsgtdygvnwvrsgkgwgvwgdgtdynsaksrsvtkdnsksvkmnssgdsaryycvtgdywggtttvssskygccdywaagtcgvsvtyckrgrkkykmrvttdgcscrggcrvksrsadaaykgnynngrrydvdkrrgrdmggkrrkngynkdkmaaysgmkgrrrgkghdgygstatkdtydahmar

SEQ ID NO: 87 - DNA, 8892 bp, Artificial Sequence
  Synthetic CAR construct
caggtggcacttttcggggaaatgtgcgcggaacccctatttgtttatttttctaaatacattcaaatatgtatccgctcatgagacaataaccctgataaatgcttcaataatattgaaaaaggaagagtatgagtattcaacatttccgtgtcgcccttattcccttttttgcggcattttgccttcctgtttttgctcacccagaaacgctggtgaaagtaaaagatgctgaagatcagttgggtgcacgagtgggttacatcgaactggatctcaacagcggtaagatccttgagagttttcgccccgaagaacgttttccaatgatgagcacttttaaagttctgctatgtggcgcggtattatcccgtattgacgccgggcaagagcaactcggtcgccgcatacactattctcagaatgacttggttgagtactcaccagtcacagaaaagcatcttacggatggcatgacagtaagagaattatgcagtgctgccataaccatgagtgataacactgcggccaacttacttctgacaacgatcggaggaccgaaggagctaaccgcttttttgcacaacatgggggatcatgtaactcgccttgatcgttgggaaccggagctgaatgaagccataccaaacgacgagcgtgacaccacgatgcctgtagcaatggcaacaacgttgcgcaaactattaactggcgaactacttactctagcttcccggcaacaattaatagactggatggaggcggataaagttgcaggaccacttctgcgctcggcccttccggctggctggtttattgctgataaatctggagccggtgagcgtgggtctcgcggtatcattgcagcactggggccagatggtaagccctcccgtatcgtagttatctacacgacggggagtcaggcaactatggatgaacgaaatagacagatcgctgagataggtgcctcactgattaagcattggtaactgtcagaccaagtttactcatatatactttagattgatttaaaacttcatttttaatttaaaaggatctaggtgaagatcctttttgataatctcatgaccaaaatcccttaacgtgagttttcgttccactgagcgtcagaccccgtagaaaagatcaaaggatcttcttgagatcctttttttctgcgcgtaatctgctgcttgcaaacaaaaaaaccaccgctaccagcggtggtttgtttgccggatcaagagctaccaactctttttccgaaggtaactggcttcagcagagcgcagataccaaatactgtccttctagtgtagccgtagttaggccaccacttcaagaactctgtagcaccgcctacatacctcgctctgctaatcctgttaccagtggctgctgccagtggcgataagtcgtgtcttaccgggttggactcaagacgatagttaccggataaggcgcagcggtcgggctgaacggggggttcgtgcacacagcccagcttggagcgaacgacctacaccgaactgagatacctacagcgtgagctatgagaaagcgccacgcttcccgaagggagaaaggcggacaggtatccggtaagcggcagggtcggaacaggagagcgcacgagggagcttccagggggaaacgcctggtatctttatagtcctgtcgggtttcgccacctctgacttgagcgtcgatttttgtgatgctcgtcaggggggcggagcctatggaaaaacgccagcaacgcggcctttttacggttcctggccttttgctggccttttgctcacatgttctttcctgcgttatcccctgattctgtggataaccgtattaccgcctttgagtgagctgataccgctcgccgcagccgaacgaccgagcgcagcgagtcagtgagcgaggaagcggaagagcgcccaatacgcaaaccgcctctccccgcgcgttggccgattcattaatgcagctggcacgacaggtttcccgactggaaagcgggcagtgagcgcaacgcaattaatgtgagttagctcactcattaggcaccccaggctttacactttatgcttccggctcgtatgttgtgtggaattgtgagcggataacaatttcacacaggaaacagctatgaccatgattacgccaagcgcgcaattaaccctcactaaagggaacaaaagctggagctgcaagcttaatgtagtcttatgcaatactcttgtagtcttgcaacatggtaacgatgagttagcaacatgccttacaaggagagaaaaagcaccgtgcatgccgattggtggaagtaaggtggtacgatcgtgccttattaggaaggcaacagacgggtctgacatggattggacgaaccactgaattgccgcattgcagagatattgtatttaagtgcctagctcgatacaataaacgggtctctctggttagaccagatctgagcctgggagctctctggctaactagggaacccactgcttaagcctcaataaagcttgccttgagtgcttcaagtagtgtgtgcccgtctgttgtgtgactctggtaactagagatccctcagacccttttagtcagtgtggaaaatctctagcagtggcgcccgaacagggacctgaaagcgaaagggaaaccagagctctctcgacgcaggactcggcttgctgaagcgcgcacggcaagaggcgaggggcggcgactggtgagtacgccaaaaattttgactagcggaggctagaaggagagagatgggtgcgagagcgtcagtattaagcgggggagaattagatcgcgatgggaaaaaattcggttaaggccagggggaaagaaaaaatataaattaaaacatatagtatgggcaagcagggagctagaacgattcgcagttaatcctggcctgttagaaacatcagaaggctgtagacaaatactgggacagctacaaccatcccttcagacaggatcagaagaacttagatcattatataatacagtagcaaccctctattgtgtgcatcaaaggatagagataaaagacaccaaggaagctttagacaagatagaggaagagcaaaacaaaagtaagaccaccgcacagcaagcggccgctgatcttcagacctggaggaggagatatgagggacaattggagaagtgaattatataaatataaagtagtaaaaattgaaccattaggagtagcacccaccaaggcaaagagaagagtggtgcagagagaaaaaagagcagtgggaataggagctttgttccttgggttcttgggagcagcaggaagcactatgggcgcagcctcaatgacgctgacggtacaggccagacaattattgtctggtatagtgcagcagcagaacaatttgctgagggctattgaggcgcaacagcatctgttgcaactcacagtctggggcatcaagcagctccaggcaagaatcctggctgtggaaagatacctaaaggatcaacagctcctggggatttggggttgctctggaaaactcatttgcaccactgctgtgccttggaatgctagttggagtaataaatctctggaacagattggaatcacacgacctggatggagtgggacagagaaattaacaattacacaagcttaatacactccttaattgaagaatcgcaaaaccagcaagaaaagaatgaacaagaattattggaattagataaatgggcaagtttgtggaattggtttaacataacaaattggctgtggtatataaaattattcataatgatagtaggaggcttggtaggtttaagaatagtttttgctgtactttctatagtgaatagagttaggcagggatattcaccattatcgtttcagacccacctcccaaccccgaggggacccgacaggcccgaaggaatagaagaagaaggtggagagagagacagagacagatccattcgattagtgaacggatctcgacggttaacttttaaaagaaaaggggggattggggggtacagtgcaggggaaagaatagtagacataatagcaacagacatacaaactaaagaattacaaaaacaaattacaaaaattcaaaattttatcgagctttgcaaagatggataaagttttaaacagagaggaatctttgcagctaatggaccttctaggtcttgaaaggagtgcctcgtgaggctccggtgcccgtcagtgggcagagcgcacatcgcccacagtccccgagaagttggggggaggggtcggcaattgaaccggtgcctagagaaggtggcgcggggtaaactgggaaagtgatgtcgtgtactggctccgcctttttcccgagggtgggggagaaccgtatataagtgcagtagtcgccgtgaacgttctttttcgcaacgggtttgccgccagaacacaggtaagtgccgtgtgtggttcccgcgggcctggcctctttacgggttatggcccttgcgtgccttgaattacttccacctggctgcagtacgtgattcttgatcccgagcttcgggttggaagtgggtgggagagttcgaggccttgcgcttaaggagccccttcgcctcgtgcttgagttgaggcctggcctgggcgctggggccgccgcgtgcgaatctggtggcaccttcgcgcctgtctcgctgctttcgataagtctctagccatttaaaatttttgatgacctgctgcgacgctttttttctggcaagatagtcttgtaaatgcgggccaagatctgcacactggtatttcggtttttggggccgcgggcggcgacggggcccgtgcgtcccagcgcacatgttcggcgaggcggggcctgcgagcgcggccaccgagaatcggacgggggtagtctcaagctggccggcctgctctggtgcctggcctcgcgccgccgtgtatcgccccgccctgggcggcaaggctggcccggtcggcaccagttgcgtgagcggaaagatggccgcttcccggccctgctgcagggagctcaaaatggaggacgcggcgctcgggagagcgggcgggtgagtcacccacacaaaggaaaagggcctttccgtcctcagccgtcgcttcatgtgactccacggagtaccgggcgccgtccaggcacctcgattagttctcgagcttttggagtacgtcgtctttaggttggggggaggggttttatgcgatggagtttccccacactgagtgggtggagactgaagttaggccagcttggcacttgatgtaattctccttggaatttgccctttttgagtttggatcttggttcattctcaagcctcagacagtggttcaaagtttttttcttccatttcaggtgtcgtgaggaattcggtaccgcggccgcccggggatccatggccttaccagtgaccgccttgctcctgccgctggccttgctgctccacgccgccaggccggatgttgttatgacccagaccccgctgtccctgcccgtttccctgggtgaccaggcgagtatctcttgccgttcctctcagtccctggttcacagtcagggtaacacctatctgcgctggtatctgcaaaaaccaggccagagccctaaagtgctgatttataaggtttcaaatcggtttagcggcgtcccggatcgcttctctgggagtggatcagggaccgactttacactgaaaattagccgcgtggaagcagaggatctgggcgtgtacttttgcagccagtccactcatgtgccgtggaccttcggcggtgggacaaaactggaaattaagcgtgcaggaggcggtgggagcggaggcggtgggtccggaggcggtgggtctggaggcggtgggagtggaggcggtgggtcaggcggtggtgggagcgaagtgaaactggatgagacaggaggaggtctggttcagccaggtcggcccatgaagctgtcctgtgtggcctctggctttaccttctccgactattggatgaactgggtccgtcagtctccggaaaaaggtctggagtgggtggcgcagattcggaacaagccctacaactacgaaacttactactctgatagtgttaaaggccgcttcaccatcagtcgtgatgactcaaaaagcagcgtttacctgcaaatgaacaatctgcgtgtcgaggacatgggcatctattactgcacaggctcctactatgggatggattattgggggcaggggacttcagttacagtttcctcaaccacgacgccagcgccgcgaccaccaacaccggcgcccaccatcgcgtcgcagcccctgtccctgcgcccagaggcgtgccggccagcggcggggggcgcagtgcacacgagggggctggacttcgcctgtgatatctacatctgggcgcccttggccgggacttgtggggtccttctcctgtcactggttatcaccctttactgcaaacggggcagaaagaaactcctgtatatattcaaacaaccatttatgagaccagtacaaactactcaagaggaagatggctgtagctgccgatttccagaagaagaagaaggaggatgtgaactgagagtgaagttcagcaggagcgcagacgcccccgcgtacaagcagggccagaaccagctctataacgagctcaatctaggacgaagagaggagtacgatgttttggacaagagacgtggccgggaccctgagatggggggaaagccgagaaggaagaaccctcaggaaggcctgtacaatgaactgcagaaagataagatggcggaggcctacagtgagattgggatgaaaggcgagcgccggaggggcaaggggcacgatggcctttaccagggtctcagtacagccaccaaggacacctacgacgcccttcacatgcaggccctgccccctcgctaagtcgacaatcaacctctggattacaaaatttgtgaaagattgactggtattcttaactatgttgctccttttacgctatgtggatacgctgctttaatgcctttgtatcatgctattgcttcccgtatggctttcattttctcctccttgtataaatcctggttgctgtctctttatgaggagttgtggcccgttgtcaggcaacgtggcgtggtgtgcactgtgtttgctgacgcaacccccactggttggggcattgccaccacctgtcagctcctttccgggactttcgctttccccctccctattgccacggcggaactcatcgccgcctgccttgcccgctgctggacaggggctcggctgttgggcactgacaattccgtggtgttgtcggggaagctgacgtcctttccatggctgctcgcctgtgttgccacctggattctgcgcgggacgtccttctgctacgtcccttcggccctcaatccagcggaccttccttcccgcggcctgctgccggctctgcggcctcttccgcgtcttcgccttcgccctcagacgagtcggatctccctttgggccgcctccccgcctggaattcgagctcggtacctttaagaccaatgacttacaaggcagctgtagatcttagccactttttaaaagaaaaggggggactggaagggctaattcactcccaacgaagacaagatctgctttttgcttgtactgggtctctctggttagaccagatctgagcctgggagctctctggctaactagggaacccactgcttaagcctcaataaagcttgccttgagtgcttcaagtagtgtgtgcccgtctgttgtgtgactctggtaactagagatccctcagacccttttagtcagtgtggaaaatctctagcagtagtagttcatgtcatcttattattcagtatttataacttgcaaagaaatgaatatcagagagtgagaggaacttgtttattgcagcttataatggttacaaataaagcaatagcatcacaaatttcacaaataaagcatttttttcactgcattctagttgtggtttgtccaaactcatcaatgtatcttatcatgtctggctctagctatcccgcccctaactccgcccagttccgcccattctccgccccatggctgactaattttttttatttatgcagaggccgaggccgcctcggcctctgagctattccagaagtagtgaggaggcttttttggaggcctaggcttttgcgtcgagacgtacccaattcgccctatagtgagtcgtattacgcgcgctcactggccgtcgttttacaacgtcgtgactgggaaaaccctggcgttacccaacttaatcgccttgcagcacatccccctttcgccagctggcgtaatagcgaagaggcccgcaccgatcgcccttcccaacagttgcgcagcctgaatggcgaatggcgcgacgcgccctgtagcggcgcattaagcgcggcgggtgtggtggttacgcgcagcgtgaccgctacacttgccagcgccctagcgcccgctcctttcgctttcttcccttcctttctcgccacgttcgccggctttccccgtcaagctctaaatcgggggctccctttagggttccgatttagtgctttacggcacctcgaccccaaaaaacttgattagggtgatggttcacgtagtgggccatcgccctgatagacggtttttcgccctttgacgttggagtccacgttctttaatagtggactcttgttccaaactggaacaacactcaaccctatctcggtctattcttttgatttataagggattttgccgatttcggcctattggttaaaaaatgagctgatttaacaaaaatttaacgcgaattttaacaaaatattaacgtttacaatttcc

SEQ ID NO: 88 - DNA, 8892 bp, Artificial Sequence
  Synthetic CAR construct
caggtggcacttttcggggaaatgtgcgcggaacccctatttgtttatttttctaaatacattcaaatatgtatccgctcatgagacaataaccctgataaatgcttcaataatattgaaaaaggaagagtatgagtattcaacatttccgtgtcgcccttattcccttttttgcggcattttgccttcctgtttttgctcacccagaaacgctggtgaaagtaaaagatgctgaagatcagttgggtgcacgagtgggttacatcgaactggatctcaacagcggtaagatccttgagagttttcgccccgaagaacgttttccaatgatgagcacttttaaagttctgctatgtggcgcggtattatcccgtattgacgccgggcaagagcaactcggtcgccgcatacactattctcagaatgacttggttgagtactcaccagtcacagaaaagcatcttacggatggcatgacagtaagagaattatgcagtgctgccataaccatgagtgataacactgcggccaacttacttctgacaacgatcggaggaccgaaggagctaaccgcttttttgcacaacatgggggatcatgtaactcgccttgatcgttgggaaccggagctgaatgaagccataccaaacgacgagcgtgacaccacgatgcctgtagcaatggcaacaacgttgcgcaaactattaactggcgaactacttactctagcttcccggcaacaattaatagactggatggaggcggataaagttgcaggaccacttctgcgctcggcccttccggctggctggtttattgctgataaatctggagccggtgagcgtgggtctcgcggtatcattgcagcactggggccagatggtaagccctcccgtatcgtagttatctacacgacggggagtcaggcaactatggatgaacgaaatagacagatcgctgagataggtgcctcactgattaagcattggtaactgtcagaccaagtttactcatatatactttagattgatttaaaacttcatttttaatttaaaaggatctaggtgaagatcctttttgataatctcatgaccaaaatcccttaacgtgagttttcgttccactgagcgtcagaccccgtagaaaagatcaaaggatcttcttgagatcctttttttctgcgcgtaatctgctgcttgcaaacaaaaaaaccaccgctaccagcggtggtttgtttgccggatcaagagctaccaactctttttccgaaggtaactggcttcagcagagcgcagataccaaatactgtccttctagtgtagccgtagttaggccaccacttcaagaactctgtagcaccgcctacatacctcgctctgctaatcctgttaccagtggctgctgccagtggcgataagtcgtgtcttaccgggttggactcaagacgatagttaccggataaggcgcagcggtcgggctgaacggggggttcgtgcacacagcccagcttggagcgaacgacctacaccgaactgagatacctacagcgtgagctatgagaaagcgccacgcttcccgaagggagaaaggcggacaggtatccggtaagcggcagggtcggaacaggagagcgcacgagggagcttccagggggaaacgcctggtatctttatagtcctgtcgggtttcgccacctctgacttgagcgtcgatttttgtgatgctcgtcaggggggcggagcctatggaaaaacgccagcaacgcggcctttttacggttcctggccttttgctggccttttgctcacatgttctttcctgcgttatcccctgattctgtggataaccgtattaccgcctttgagtgagctgataccgctcgccgcagccgaacgaccgagcgcagcgagtcagtgagcgaggaagcggaagagcgcccaatacgcaaaccgcctctccccgcgcgttggccgattcattaatgcagctggcacgacaggtttcccgactggaaagcgggcagtgagcgcaacgcaattaatgtgagttagctcactcattaggcaccccaggctttacactttatgcttccggctcgtatgttgtgtggaattgtgagcggataacaatttcacacaggaaacagctatgaccatgattacgccaagcgcgcaattaaccctcactaaagggaacaaaagctggagctgcaagcttaatgtagtcttatgcaatactcttgtagtcttgcaacatggtaacgatgagttagcaacatgccttacaaggagagaaaaagcaccgtgcatgccgattggtggaagtaaggtggtacgatcgtgccttattaggaaggcaacagacgggtctgacatggattggacgaaccactgaattgccgcattgcagagatattgtatttaagtgcctagctcgatacaataaacgggtctctctggttagaccagatctgagcctgggagctctctggctaactagggaacccactgcttaagcctcaataaagcttgccttgagtgcttcaagtagtgtgtgcccgtctgttgtgtgactctggtaactagagatccctcagacccttttagtcagtgtggaaaatctctagcagtggcgcccgaacagggacctgaaagcgaaagggaaaccagagctctctcgacgcaggactcggcttgctgaagcgcgcacggcaagaggcgaggggcggcgactggtgagtacgccaaaaattttgactagcggaggctagaaggagagagatgggtgcgagagcgtcagtattaagcgggggagaattagatcgcgatgggaaaaaattcggttaaggccagggggaaagaaaaaatataaattaaaacatatagtatgggcaagcagggagctagaacgattcgcagttaatcctggcctgttagaaacatcagaaggctgtagacaaatactgggacagctacaaccatcccttcagacaggatcagaagaacttagatcattatataatacagtagcaaccctctattgtgtgcatcaaaggatagagataaaagacaccaaggaagctttagacaagatagaggaagagcaaaacaaaagtaagaccaccgcacagcaagcggccgctgatcttcagacctggaggaggagatatgagggacaattggagaagtgaattatataaatataaagtagtaaaaattgaaccattaggagtagcacccaccaaggcaaagagaagagtggtgcagagagaaaaaagagcagtgggaataggagctttgttccttgggttcttgggagcagcaggaagcactatgggcgcagcctcaatgacgctgacggtacaggccagacaattattgtctggtatagtgcagcagcagaacaatttgctgagggctattgaggcgcaacagcatctgttgcaactcacagtctggggcatcaagcagctccaggcaagaatcctggctgtggaaagatacctaaaggatcaacagctcctggggatttggggttgctctggaaaactcatttgcaccactgctgtgccttggaatgctagttggagtaataaatctctggaacagattggaatcacacgacctggatggagtgggacagagaaattaacaattacacaagcttaatacactccttaattgaagaatcgcaaaaccagcaagaaaagaatgaacaagaattattggaattagataaatgggcaagtttgtggaattggtttaacataacaaattggctgtggtatataaaattattcataatgatagtaggaggcttggtaggtttaagaatagtttttgctgtactttctatagtgaatagagttaggcagggatattcaccattatcgtttcagacccacctcccaaccccgaggggacccgacaggcccgaaggaatagaagaagaaggtggagagagagacagagacagatccattcgattagtgaacggatctcgacggttaacttttaaaagaaaaggggggattggggggtacagtgcaggggaaagaatagtagacataatagcaacagacatacaaactaaagaattacaaaaacaaattacaaaaattcaaaattttatcgagctttgcaaagatggataaagttttaaacagagaggaatctttgcagctaatggaccttctaggtcttgaaaggagtgcctcgtgaggctccggtgcccgtcagtgggcagagcgcacatcgcccacagtccccgagaagttggggggaggggtcggcaattgaaccggtgcctagagaaggtggcgcggggtaaactgggaaagtgatgtcgtgtactggctccgcctttttcccgagggtgggggagaaccgtatataagtgcagtagtcgccgtgaacgttctttttcgcaacgggtttgccgccagaacacaggtaagtgccgtgtgtggttcccgcgggcctggcctctttacgggttatggcccttgcgtgccttgaattacttccacctggctgcagtacgtgattcttgatcccgagcttcgggttggaagtgggtgggagagttcgaggccttgcgcttaaggagccccttcgcctcgtgcttgagttgaggcctggcctgggcgctggggccgccgcgtgcgaatctggtggcaccttcgcgcctgtctcgctgctttcgataagtctctagccatttaaaatttttgatgacctgctgcgacgctttttttctggcaagatagtcttgtaaatgcgggccaagatctgcacactggtatttcggtttttggggccgcgggcggcgacggggcccgtgcgtcccagcgcacatgttcggcgaggcggggcctgcgagcgcggccaccgagaatcggacgggggtagtctcaagctggccggcctgctctggtgcctggcctcgcgccgccgtgtatcgccccgccctgggcggcaaggctggcccggtcggcaccagttgcgtgagcggaaagatggccgcttcccggccctgctgcagggagctcaaaatggaggacgcggcgctcgggagagcgggcgggtgagtcacccacacaaaggaaaagggcctttccgtcctcagccgtcgcttcatgtgactccacggagtaccgggcgccgtccaggcacctcgattagttctcgagcttttggagtacgtcgtctttaggttggggggaggggttttatgcgatggagtttccccacactgagtgggtggagactgaagttaggccagcttggcacttgatgtaattctccttggaatttgccctttttgagtttggatcttggttcattctcaagcctcagacagtggttcaaagtttttttcttccatttcaggtgtcgtgaggaattcggtaccgcggccgcccggggatccatggccttaccagtgaccgccttgctcctgccgctggccttgctgctccacgccgccaggccggacattcagatgactcagagcccgtcttccctgtccgcttcagtgggtgaccgtgttaccattacctgccgtgcttctcagagcctggtgcactcccagggtaacacctatctgcggtggtatcagcagaaaccgggcaaggcccccaaagttctgatttataaggtctctaatcggtttagtggcgttccgtcacgcttctcaggtagcgggtccggaacagattttaccctgacaattagcagcctgcaaccggaagacttcgcaacctattactgccagcagtctacccatgtgccctggacatttggccagggtactaaggttgagctgaaacgtgctggaggtggaggaagcggaggtggaggcagcggcggtgggggatctggcggtgggggaagtggcggtgggggatcaggcggtgggggaagcgaagtccagctggtggagagtggaggtggactggtgcagccaggaggcagcctgcgtctgtcctgtgccgcgtctggctttaccttcagcgattactggatgaactgggtccgtcaggcaccaggaaagggcctggaatgggtggcgcagattcggaacaagccttacaactacgagacttactacgcggatagcgtgaagggtcgcttcaccatcagtcgtgacacatcaaagaacactgtttacctgcaaatgaacagcctgcgtgcagaagataccgctgtctattactgcacaggctcttattacggcatggactactggggccagggtactctggtgaccgtttctagtaccacgacgccagcgccgcgaccaccaacaccggcgcccaccatcgcgtcgcagcccctgtccctgcgcccagaggcgtgccggccagcggcggggggcgcagtgcacacgagggggctggacttcgcctgtgatatctacatctgggcgcccttggccgggacttgtggggtccttctcctgtcactggttatcaccctttactgcaaacggggcagaaagaaactcctgtatatattcaaacaaccatttatgagaccagtacaaactactcaagaggaagatggctgtagctgccgatttccagaagaagaagaaggaggatgtgaactgagagtgaagttcagcaggagcgcagacgcccccgcgtacaagcagggccagaaccagctctataacgagctcaatctaggacgaagagaggagtacgatgttttggacaagagacgtggccgggaccctgagatggggggaaagccgagaaggaagaaccctcaggaaggcctgtacaatgaactgcagaaagataagatggcggaggcctacagtgagattgggatgaaaggcgagcgccggaggggcaaggggcacgatggcctttaccagggtctcagtacagccaccaaggacacctacgacgcccttcacatgcaggccctgccccctcgctaagtcgacaatcaacctctggattacaaaatttgtgaaagattgactggtattcttaactatgttgctccttttacgctatgtggatacgctgctttaatgcctttgtatcatgctattgcttcccgtatggctttcattttctcctccttgtataaatcctggttgctgtctctttatgaggagttgtggcccgttgtcaggcaacgtggcgtggtgtgcactgtgtttgctgacgcaacccccactggttggggcattgccaccacctgtcagctcctttccgggactttcgctttccccctccctattgccacggcggaactcatcgccgcctgccttgcccgctgctggacaggggctcggctgttgggcactgacaattccgtggtgttgtcggggaagctgacgtcctttccatggctgctcgcctgtgttgccacctggattctgcgcgggacgtccttctgctacgtcccttcggccctcaatccagcggaccttccttcccgcggcctgctgccggctctgcggcctcttccgcgtcttcgccttcgccctcagacgagtcggatctccctttgggccgcctccccgcctggaattcgagctcggtacctttaagaccaatgacttacaaggcagctgtagatcttagccactttttaaaagaaaaggggggactggaagggctaattcactcccaacgaagacaagatctgctttttgcttgtactgggtctctctggttagaccagatctgagcctgggagctctctggctaactagggaacccactgcttaagcctcaataaagcttgccttgagtgcttcaagtagtgtgtgcccgtctgttgtgtgactctggtaactagagatccctcagacccttttagtcagtgtggaaaatctctagcagtagtagttcatgtcatcttattattcagtatttataacttgcaaagaaatgaatatcagagagtgagaggaacttgtttattgcagcttataatggttacaaataaagcaatagcatcacaaatttcacaaataaagcatttttttcactgcattctagttgtggtttgtccaaactcatcaatgtatcttatcatgtctggctctagctatcccgcccctaactccgcccagttccgcccattctccgccccatggctgactaattttttttatttatgcagaggccgaggccgcctcggcctctgagctattccagaagtagtgaggaggcttttttggaggcctaggcttttgcgtcgagacgtacccaattcgccctatagtgagtcgtattacgcgcgctcactggccgtcgttttacaacgtcgtgactgggaaaaccctggcgttacccaacttaatcgccttgcagcacatccccctttcgccagctggcgtaatagcgaagaggcccgcaccgatcgcccttcccaacagttgcgcagcctgaatggcgaatggcgcgacgcgccctgtagcggcgcattaagcgcggcgggtgtggtggttacgcgcagcgtgaccgctacacttgccagcgccctagcgcccgctcctttcgctttcttcccttcctttctcgccacgttcgccggctttccccgtcaagctctaaatcgggggctccctttagggttccgatttagtgctttacggcacctcgaccccaaaaaacttgattagggtgatggttcacgtagtgggccatcgccctgatagacggtttttcgccctttgacgttggagtccacgttctttaatagtggactcttgttccaaactggaacaacactcaaccctatctcggtctattcttttgatttataagggattttgccgatttcggcctattggttaaaaaatgagctgatttaacaaaaatttaacgcgaattttaacaaaatattaacgtttacaatttcc

SEQ ID NO: 89 - DNA, 8868 bp, Artificial Sequence
  Synthetic CAR construct
caggtggcacttttcggggaaatgtgcgcggaacccctatttgtttatttttctaaatacattcaaatatgtatccgctcatgagacaataaccctgataaatgcttcaataatattgaaaaaggaagagtatgagtattcaacatttccgtgtcgcccttattcccttttttgcggcattttgccttcctgtttttgctcacccagaaacgctggtgaaagtaaaagatgctgaagatcagttgggtgcacgagtgggttacatcgaactggatctcaacagcggtaagatccttgagagttttcgccccgaagaacgttttccaatgatgagcacttttaaagttctgctatgtggcgcggtattatcccgtattgacgccgggcaagagcaactcggtcgccgcatacactattctcagaatgacttggttgagtactcaccagtcacagaaaagcatcttacggatggcatgacagtaagagaattatgcagtgctgccataaccatgagtgataacactgcggccaacttacttctgacaacgatcggaggaccgaaggagctaaccgcttttttgcacaacatgggggatcatgtaactcgccttgatcgttgggaaccggagctgaatgaagccataccaaacgacgagcgtgacaccacgatgcctgtagcaatggcaacaacgttgcgcaaactattaactggcgaactacttactctagcttcccggcaacaattaatagactggatggaggcggataaagttgcaggaccacttctgcgctcggcccttccggctggctggtttattgctgataaatctggagccggtgagcgtgggtctcgcggtatcattgcagcactggggccagatggtaagccctcccgtatcgtagttatctacacgacggggagtcaggcaactatggatgaacgaaatagacagatcgctgagataggtgcctcactgattaagcattggtaactgtcagaccaagtttactcatatatactttagattgatttaaaacttcatttttaatttaaaaggatctaggtgaagatcctttttgataatctcatgaccaaaatcccttaacgtgagttttcgttccactgagcgtcagaccccgtagaaaagatcaaaggatcttcttgagatcctttttttctgcgcgtaatctgctgcttgcaaacaaaaaaaccaccgctaccagcggtggtttgtttgccggatcaagagctaccaactctttttccgaaggtaactggcttcagcagagcgcagataccaaatactgtccttctagtgtagccgtagttaggccaccacttcaagaactctgtagcaccgcctacatacctcgctctgctaatcctgttaccagtggctgctgccagtggcgataagtcgtgtcttaccgggttggactcaagacgatagttaccggataaggcgcagcggtcgggctgaacggggggttcgtgcacacagcccagcttggagcgaacgacctacaccgaactgagatacctacagcgtgagctatgagaaagcgccacgcttcccgaagggagaaaggcggacaggtatccggtaagcggcagggtcggaacaggagagcgcacgagggagcttccagggggaaacgcctggtatctttatagtcctgtcgggtttcgccacctctgacttgagcgtcgatttttgtgatgctcgtcaggggggcggagcctatggaaaaacgccagcaacgcggcctttttacggttcctggccttttgctggccttttgctcacatgttctttcctgcgttatcccctgattctgtggataaccgtattaccgcctttgagtgagctgataccgctcgccgcagccgaacgaccgagcgcagcgagtcagtgagcgaggaagcggaagagcgcccaatacgcaaaccgcctctccccgcgcgttggccgattcattaatgcagctggcacgacaggtttcccgactggaaagcgggcagtgagcgcaacgcaattaatgtgagttagctcactcattaggcaccccaggctttacactttatgcttccggctcgtatgttgtgtggaattgtgagcggataacaatttcacacaggaaacagctatgaccatgattacgccaagcgcgcaattaaccctcactaaagggaacaaaagctggagctgcaagcttaatgtagtcttatgcaatactcttgtagtcttgcaacatggtaacgatgagttagcaacatgccttacaaggagagaaaaagcaccgtgcatgccgattggtggaagtaaggtggtacgatcgtgccttattaggaaggcaacagacgggtctgacatggattggacgaaccactgaattgccgcattgcagagatattgtatttaagtgcctagctcgatacaataaacgggtctctctggttagaccagatctgagcctgggagctctctggctaactagggaacccactgcttaagcctcaataaagcttgccttgagtgcttcaagtagtgtgtgcccgtctgttgtgtgactctggtaactagagatccctcagacccttttagtcagtgtggaaaatctctagcagtggcgcccgaacagggacctgaaagcgaaagggaaaccagagctctctcgacgcaggactcggcttgctgaagcgcgcacggcaagaggcgaggggcggcgactggtgagtacgccaaaaattttgactagcggaggctagaaggagagagatgggtgcgagagcgtcagtattaagcgggggagaattagatcgcgatgggaaaaaattcggttaaggccagggggaaagaaaaaatataaattaaaacatatagtatgggcaagcagggagctagaacgattcgcagttaatcctggcctgttagaaacatcagaaggctgtagacaaatactgggacagctacaaccatcccttcagacaggatcagaagaacttagatcattatataatacagtagcaaccctctattgtgtgcatcaaaggatagagataaaagacaccaaggaagctttagacaagatagaggaagagcaaaacaaaagtaagaccaccgcacagcaagcggccgctgatcttcagacctggaggaggagatatgagggacaattggagaagtgaattatataaatataaagtagtaaaaattgaaccattaggagtagcacccaccaaggcaaagagaagagtggtgcagagagaaaaaagagcagtgggaataggagctttgttccttgggttcttgggagcagcaggaagcactatgggcgcagcctcaatgacgctgacggtacaggccagacaattattgtctggtatagtgcagcagcagaacaatttgctgagggctattgaggcgcaacagcatctgttgcaactcacagtctggggcatcaagcagctccaggcaagaatcctggctgtggaaagatacctaaaggatcaacagctcctggggatttggggttgctctggaaaactcatttgcaccactgctgtgccttggaatgctagttggagtaataaatctctggaacagattggaatcacacgacctggatggagtgggacagagaaattaacaattacacaagcttaatacactccttaattgaagaatcgcaaaaccagcaagaaaagaatgaacaagaattattggaattagataaatgggcaagtttgtggaattggtttaacataacaaattggctgtggtatataaaattattcataatgatagtaggaggcttggtaggtttaagaatagtttttgctgtactttctatagtgaatagagttaggcagggatattcaccattatcgtttcagacccacctcccaaccccgaggggacccgacaggcccgaaggaatagaagaagaaggtggagagagagacagagacagatccattcgattagtgaacggatctcgacggttaacttttaaaagaaaaggggggattggggggtacagtgcaggggaaagaatagtagacataatagcaacagacatacaaactaaagaattacaaaaacaaattacaaaaattcaaaattttatcgagctttgcaaagatggataaagttttaaacagagaggaatctttgcagctaatggaccttctaggtcttgaaaggagtgcctcgtgaggctccggtgcccgtcagtgggcagagcgcacatcgcccacagtccccgagaagttggggggaggggtcggcaattgaaccggtgcctagagaaggtggcgcggggtaaactgggaaagtgatgtcgtgtactggctccgcctttttcccgagggtgggggagaaccgtatataagtgcagtagtcgccgtgaacgttctttttcgcaacgggtttgccgccagaacacaggtaagtgccgtgtgtggttcccgcgggcctggcctctttacgggttatggcccttgcgtgccttgaattacttccacctggctgcagtacgtgattcttgatcccgagcttcgggttggaagtgggtgggagagttcgaggccttgcgcttaaggagccccttcgcctcgtgcttgagttgaggcctggcctgggcgctggggccgccgcgtgcgaatctggtggcaccttcgcgcctgtctcgctgctttcgataagtctctagccatttaaaatttttgatgacctgctgcgacgctttttttctggcaagatagtcttgtaaatgcgggccaagatctgcacactggtatttcggtttttggggccgcgggcggcgacggggcccgtgcgtcccagcgcacatgttcggcgaggcggggcctgcgagcgcggccaccgagaatcggacgggggtagtctcaagctggccggcctgctctggtgcctggcctcgcgccgccgtgtatcgccccgccctgggcggcaaggctggcccggtcggcaccagttgcgtgagcggaaagatggccgcttcccggccctgctgcagggagctcaaaatggaggacgcggcgctcgggagagcgggcgggtgagtcacccacacaaaggaaaagggcctttccgtcctcagccgtcgcttcatgtgactccacggagtaccgggcgccgtccaggcacctcgattagttctcgagcttttggagtacgtcgtctttaggttggggggaggggttttatgcgatggagtttccccacactgagtgggtggagactgaagttaggccagcttggcacttgatgtaattctccttggaatttgccctttttgagtttggatcttggttcattctcaagcctcagacagtggttcaaagtttttttcttccatttcaggtgtcgtgaggaattcggtaccgcggccgcccggggatccatggccttaccagtgaccgccttgctcctgccgctggccttgctgctccacgccgccaggccggatgttgttatgacacagaccccgctgagtctgcccgtctccctgggcgaccaggcctccatttcttgccgtagttcacagtccctggtgcactctaacggaaatacctatctgcgctggtacctgcagaaaccgggccagagccccaaagtcctgatctataaggtgtccaaccgggtgtctggtgttccggatcgcttttcagggagcggcagcggcaccgacttcacactgaagatcaatcgtgttgaagcagaggatctgggcgtctacttttgctctcagagtacacatgtgccatggactttcggcggtgggaccaaactggaaattaagagctccgcagatgacgctaaaaaggacgccgcgaaaaaggatgacgccaaaaaggatgacgcgaaaaaggatggaggcgtcaaactggacgagaccggtgggggactggtgcagccgggcggtgcaatgaagctgagttgtgtgacttcaggttttaccttcgggcactattggatgaactgggttcgtcagagtccagaaaaaggtctggagtgggtcgctcagtttcggaacaagccttacaactacgaaacatactactcagatagcgttaaagggcgcttcactattagccgtgatgactccaagtctagtgtgtacctgcagatgaacaatctgcgggttgaggacacaggcatctattactgcacaggggcgtcctatggtatggagtatctggggcagggaacaagcgtcaccgtctcaaccacgacgccagcgccgcgaccaccaacaccggcgcccaccatcgcgtcgcagcccctgtccctgcgcccagaggcgtgccggccagcggcggggggcgcagtgcacacgagggggctggacttcgcctgtgatatctacatctgggcgcccttggccgggacttgtggggtccttctcctgtcactggttatcaccctttactgcaaacggggcagaaagaaactcctgtatatattcaaacaaccatttatgagaccagtacaaactactcaagaggaagatggctgtagctgccgatttccagaagaagaagaaggaggatgtgaactgagagtgaagttcagcaggagcgcagacgcccccgcgtacaagcagggccagaaccagctctataacgagctcaatctaggacgaagagaggagtacgatgttttggacaagagacgtggccgggaccctgagatggggggaaagccgagaaggaagaaccctcaggaaggcctgtacaatgaactgcagaaagataagatggcggaggcctacagtgagattgggatgaaaggcgagcgccggaggggcaaggggcacgatggcctttaccagggtctcagtacagccaccaaggacacctacgacgcccttcacatgcaggccctgccccctcgctaagtcgacaatcaacctctggattacaaaatttgtgaaagattgactggtattcttaactatgttgctccttttacgctatgtggatacgctgctttaatgcctttgtatcatgctattgcttcccgtatggctttcattttctcctccttgtataaatcctggttgctgtctctttatgaggagttgtggcccgttgtcaggcaacgtggcgtggtgtgcactgtgtttgctgacgcaacccccactggttggggcattgccaccacctgtcagctcctttccgggactttcgctttccccctccctattgccacggcggaactcatcgccgcctgccttgcccgctgctggacaggggctcggctgttgggcactgacaattccgtggtgttgtcggggaagctgacgtcctttccatggctgctcgcctgtgttgccacctggattctgcgcgggacgtccttctgctacgtcccttcggccctcaatccagcggaccttccttcccgcggcctgctgccggctctgcggcctcttccgcgtcttcgccttcgccctcagacgagtcggatctccctttgggccgcctccccgcctggaattcgagctcggtacctttaagaccaatgacttacaaggcagctgtagatcttagccactttttaaaagaaaaggggggactggaagggctaattcactcccaacgaagacaagatctgctttttgcttgtactgggtctctctggttagaccagatctgagcctgggagctctctggctaactagggaacccactgcttaagcctcaataaagcttgccttgagtgcttcaagtagtgtgtgcccgtctgttgtgtgactctggtaactagagatccctcagacccttttagtcagtgtggaaaatctctagcagtagtagttcatgtcatcttattattcagtatttataacttgcaaagaaatgaatatcagagagtgagaggaacttgtttattgcagcttataatggttacaaataaagcaatagcatcacaaatttcacaaataaagcatttttttcactgcattctagttgtggtttgtccaaactcatcaatgtatcttatcatgtctggctctagctatcccgcccctaactccgcccagttccgcccattctccgccccatggctgactaattttttttatttatgcagaggccgaggccgcctcggcctctgagctattccagaagtagtgaggaggcttttttggaggcctaggcttttgcgtcgagacgtacccaattcgccctatagtgagtcgtattacgcgcgctcactggccgtcgttttacaacgtcgtgactgggaaaaccctggcgttacccaacttaatcgccttgcagcacatccccctttcgccagctggcgtaatagcgaagaggcccgcaccgatcgcccttcccaacagttgcgcagcctgaatggcgaatggcgcgacgcgccctgtagcggcgcattaagcgcggcgggtgtggtggttacgcgcagcgtgaccgctacacttgccagcgccctagcgcccgctcctttcgctttcttcccttcctttctcgccacgttcgccggctttccccgtcaagctctaaatcgggggctccctttagggttccgatttagtgctttacggcacctcgaccccaaaaaacttgattagggtgatggttcacgtagtgggccatcgccctgatagacggtttttcgccctttgacgttggagtccacgttctttaatagtggactcttgttccaaactggaacaacactcaaccctatctcggtctattcttttgatttataagggattttgccgatttcggcctattggttaaaaaatgagctgatttaacaaaaatttaacgcgaattttaacaaaatattaacgtttacaatttcc

SEQ ID NO: 90 - DNA, 8859 bp, Artificial Sequence
  Synthetic CAR construct
caggtggcacttttcggggaaatgtgcgcggaacccctatttgtttatttttctaaatacattcaaatatgtatccgctcatgagacaataaccctgataaatgcttcaataatattgaaaaaggaagagtatgagtattcaacatttccgtgtcgcccttattcccttttttgcggcattttgccttcctgtttttgctcacccagaaacgctggtgaaagtaaaagatgctgaagatcagttgggtgcacgagtgggttacatcgaactggatctcaacagcggtaagatccttgagagttttcgccccgaagaacgttttccaatgatgagcacttttaaagttctgctatgtggcgcggtattatcccgtattgacgccgggcaagagcaactcggtcgccgcatacactattctcagaatgacttggttgagtactcaccagtcacagaaaagcatcttacggatggcatgacagtaagagaattatgcagtgctgccataaccatgagtgataacactgcggccaacttacttctgacaacgatcggaggaccgaaggagctaaccgcttttttgcacaacatgggggatcatgtaactcgccttgatcgttgggaaccggagctgaatgaagccataccaaacgacgagcgtgacaccacgatgcctgtagcaatggcaacaacgttgcgcaaactattaactggcgaactacttactctagcttcccggcaacaattaatagactggatggaggcggataaagttgcaggaccacttctgcgctcggcccttccggctggctggtttattgctgataaatctggagccggtgagcgtgggtctcgcggtatcattgcagcactggggccagatggtaagccctcccgtatcgtagttatctacacgacggggagtcaggcaactatggatgaacgaaatagacagatcgctgagataggtgcctcactgattaagcattggtaactgtcagaccaagtttactcatatatactttagattgatttaaaacttcatttttaatttaaaaggatctaggtgaagatcctttttgataatctcatgaccaaaatcccttaacgtgagttttcgttccactgagcgtcagaccccgtagaaaagatcaaaggatcttcttgagatcctttttttctgcgcgtaatctgctgcttgcaaacaaaaaaaccaccgctaccagcggtggtttgtttgccggatcaagagctaccaactctttttccgaaggtaactggcttcagcagagcgcagataccaaatactgtccttctagtgtagccgtagttaggccaccacttcaagaactctgtagcaccgcctacatacctcgctctgctaatcctgttaccagtggctgctgccagtggcgataagtcgtgtcttaccgggttggactcaagacgatagttaccggataaggcgcagcggtcgggctgaacggggggttcgtgcacacagcccagcttggagcgaacgacctacaccgaactgagatacctacagcgtgagctatgagaaagcgccacgcttcccgaagggagaaaggcggacaggtatccggtaagcggcagggtcggaacaggagagcgcacgagggagcttccagggggaaacgcctggtatctttatagtcctgtcgggtttcgccacctctgacttgagcgtcgatttttgtgatgctcgtcaggggggcggagcctatggaaaaacgccagcaacgcggcctttttacggttcctggccttttgctggccttttgctcacatgttctttcctgcgttatcccctgattctgtggataaccgtattaccgcctttgagtgagctgataccgctcgccgcagccgaacgaccgagcgcagcgagtcagtgagcgaggaagcggaagagcgcccaatacgcaaaccgcctctccccgcgcgttggccgattcattaatgcagctggcacgacaggtttcccgactggaaagcgggcagtgagcgcaacgcaattaatgtgagttagctcactcattaggcaccccaggctttacactttatgcttccggctcgtatgttgtgtggaattgtgagcggataacaatttcacacaggaaacagctatgaccatgattacgccaagcgcgcaattaaccctcactaaagggaacaaaagctggagctgcaagcttaatgtagtcttatgcaatactcttgtagtcttgcaacatggtaacgatgagttagcaacatgccttacaaggagagaaaaagcaccgtgcatgccgattggtggaagtaaggtggtacgatcgtgccttattaggaaggcaacagacgggtctgacatggattggacgaaccactgaattgccgcattgcagagatattgtatttaagtgcctagctcgatacaataaacgggtctctctggttagaccagatctgagcctgggagctctctggctaactagggaacccactgcttaagcctcaataaagcttgccttgagtgcttcaagtagtgtgtgcccgtctgttgtgtgactctggtaactagagatccctcagacccttttagtcagtgtggaaaatctctagcagtggcgcccgaacagggacctgaaagcgaaagggaaaccagagctctctcgacgcaggactcggcttgctgaagcgcgcacggcaagaggcgaggggcggcgactggtgagtacgccaaaaattttgactagcggaggctagaaggagagagatgggtgcgagagcgtcagtattaagcgggggagaattagatcgcgatgggaaaaaattcggttaaggccagggggaaagaaaaaatataaattaaaacatatagtatgggcaagcagggagctagaacgattcgcagttaatcctggcctgttagaaacatcagaaggctgtagacaaatactgggacagctacaaccatcccttcagacaggatcagaagaacttagatcattatataatacagtagcaaccctctattgtgtgcatcaaaggatagagataaaagacaccaaggaagctttagacaagatagaggaagagcaaaacaaaagtaagaccaccgcacagcaagcggccgctgatcttcagacctggaggaggagatatgagggacaattggagaagtgaattatataaatataaagtagtaaaaattgaaccattaggagtagcacccaccaaggcaaagagaagagtggtgcagagagaaaaaagagcagtgggaataggagctttgttccttgggttcttgggagcagcaggaagcactatgggcgcagcctcaatgacgctgacggtacaggccagacaattattgtctggtatagtgcagcagcagaacaatttgctgagggctattgaggcgcaacagcatctgttgcaactcacagtctggggcatcaagcagctccaggcaagaatcctggctgtggaaagatacctaaaggatcaacagctcctggggatttggggttgctctggaaaactcatttgcaccactgctgtgccttggaatgctagttggagtaataaatctctggaacagattggaatcacacgacctggatggagtgggacagagaaattaacaattacacaagcttaatacactccttaattgaagaatcgcaaaaccagcaagaaaagaatgaacaagaattattggaattagataaatgggcaagtttgtggaattggtttaacataacaaattggctgtggtatataaaattattcataatgatagtaggaggcttggtaggtttaagaatagtttttgctgtactttctatagtgaatagagttaggcagggatattcaccattatcgtttcagacccacctcccaaccccgaggggacccgacaggcccgaaggaatagaagaagaaggtggagagagagacagagacagatccattcgattagtgaacggatctcgacggttaacttttaaaagaaaaggggggattggggggtacagtgcaggggaaagaatagtagacataatagcaacagacatacaaactaaagaattacaaaaacaaattacaaaaattcaaaattttatcgagctttgcaaagatggataaagttttaaacagagaggaatctttgcagctaatggaccttctaggtcttgaaaggagtgcctcgtgaggctccggtgcccgtcagtgggcagagcgcacatcgcccacagtccccgagaagttggggggaggggtcggcaattgaaccggtgcctagagaaggtggcgcggggtaaactgggaaagtgatgtcgtgtactggctccgcctttttcccgagggtgggggagaaccgtatataagtgcagtagtcgccgtgaacgttctttttcgcaacgggtttgccgccagaacacaggtaagtgccgtgtgtggttcccgcgggcctggcctctttacgggttatggcccttgcgtgccttgaattacttccacctggctgcagtacgtgattcttgatcccgagcttcgggttggaagtgggtgggagagttcgaggccttgcgcttaaggagccccttcgcctcgtgcttgagttgaggcctggcctgggcgctggggccgccgcgtgcgaatctggtggcaccttcgcgcctgtctcgctgctttcgataagtctctagccatttaaaatttttgatgacctgctgcgacgctttttttctggcaagatagtcttgtaaatgcgggccaagatctgcacactggtatttcggtttttggggccgcgggcggcgacggggcccgtgcgtcccagcgcacatgttcggcgaggcggggcctgcgagcgcggccaccgagaatcggacgggggtagtctcaagctggccggcctgctctggtgcctggcctcgcgccgccgtgtatcgccccgccctgggcggcaaggctggcccggtcggcaccagttgcgtgagcggaaagatggccgcttcccggccctgctgcagggagctcaaaatggaggacgcggcgctcgggagagcgggcgggtgagtcacccacacaaaggaaaagggcctttccgtcctcagccgtcgcttcatgtgactccacggagtaccgggcgccgtccaggcacctcgattagttctcgagcttttggagtacgtcgtctttaggttggggggaggggttttatgcgatggagtttccccacactgagtgggtggagactgaagttaggccagcttggcacttgatgtaattctccttggaatttgccctttttgagtttggatcttggttcattctcaagcctcagacagtggttcaaagtttttttcttccatttcaggtgtcgtgaggaattcggtaccgcggccgcccggggatccatggccttaccagtgaccgccttgctcctgccgctggccttgctgctccacgccgccaggccgcaggttcagctggttgagagcggaggcaatctggttcagcccggtggtagtctgcgtctgtcttgtgcggcgtcagggttcactttcggtagtttttcaatgagctgggtccgtcaggcaccaggcggtgggctggaatgggtggcaggtctgtctgcacgtagctccctgacccactatgcagatagtgttaaagggcggttcacaatttcacgcgacaacgctaagaatagcgtctacctgcaaatgaactccctgcgggtcgaggataccgcagtgtattactgcgctcgccgttcttatgactctagtggatactggggccatttttatagctacatggatgtgtggggacagggcactctggtgaccgtttccggaggcggtgggtctggaggcggtgggagtggaggcggtgggtcaagcgttctgacccagccgtcctctgtcagcgccgcgccaggccagaaagtgacaatttcctgttctggaagtacttcaaacatcggcaacaattatgtttcctggtatcagcagcacccgggcaaagcgcccaagctgatgatttatgatgtgtctaaacgtccaagtggtgttcctgaccggttcagcggttccaagtctgggaatagtgcctcactggacatctcaggcctgcaaagcgaagatgaggcggactattactgcgcagcttgggatgacagcctgtccgaatttctgttcggcaccgggacaaagctgaccgtgctgggcaccacgacgccagcgccgcgaccaccaacaccggcgcccaccatcgcgtcgcagcccctgtccctgcgcccagaggcgtgccggccagcggcggggggcgcagtgcacacgagggggctggacttcgcctgtgatatctacatctgggcgcccttggccgggacttgtggggtccttctcctgtcactggttatcaccctttactgcaaacggggcagaaagaaactcctgtatatattcaaacaaccatttatgagaccagtacaaactactcaagaggaagatggctgtagctgccgatttccagaagaagaagaaggaggatgtgaactgagagtgaagttcagcaggagcgcagacgcccccgcgtacaagcagggccagaaccagctctataacgagctcaatctaggacgaagagaggagtacgatgttttggacaagagacgtggccgggaccctgagatggggggaaagccgagaaggaagaaccctcaggaaggcctgtacaatgaactgcagaaagataagatggcggaggcctacagtgagattgggatgaaaggcgagcgccggaggggcaaggggcacgatggcctttaccagggtctcagtacagccaccaaggacacctacgacgcccttcacatgcaggccctgccccctcgctaagtcgacaatcaacctctggattacaaaatttgtgaaagattgactggtattcttaactatgttgctccttttacgctatgtggatacgctgctttaatgcctttgtatcatgctattgcttcccgtatggctttcattttctcctccttgtataaatcctggttgctgtctctttatgaggagttgtggcccgttgtcaggcaacgtggcgtggtgtgcactgtgtttgctgacgcaacccccactggttggggcattgccaccacctgtcagctcctttccgggactttcgctttccccctccctattgccacggcggaactcatcgccgcctgccttgcccgctgctggacaggggctcggctgttgggcactgacaattccgtggtgttgtcggggaagctgacgtcctttccatggctgctcgcctgtgttgccacctggattctgcgcgggacgtccttctgctacgtcccttcggccctcaatccagcggaccttccttcccgcggcctgctgccggctctgcggcctcttccgcgtcttcgccttcgccctcagacgagtcggatctccctttgggccgcctccccgcctggaattcgagctcggtacctttaagaccaatgacttacaaggcagctgtagatcttagccactttttaaaagaaaaggggggactggaagggctaattcactcccaacgaagacaagatctgctttttgcttgtactgggtctctctggttagaccagatctgagcctgggagctctctggctaactagggaacccactgcttaagcctcaataaagcttgccttgagtgcttcaagtagtgtgtgcccgtctgttgtgtgactctggtaactagagatccctcagacccttttagtcagtgtggaaaatctctagcagtagtagttcatgtcatcttattattcagtatttataacttgcaaagaaatgaatatcagagagtgagaggaacttgtttattgcagcttataatggttacaaataaagcaatagcatcacaaatttcacaaataaagcatttttttcactgcattctagttgtggtttgtccaaactcatcaatgtatcttatcatgtctggctctagctatcccgcccctaactccgcccagttccgcccattctccgccccatggctgactaattttttttatttatgcagaggccgaggccgcctcggcctctgagctattccagaagtagtgaggaggcttttttggaggcctaggcttttgcgtcgagacgtacccaattcgccctatagtgagtcgtattacgcgcgctcactggccgtcgttttacaacgtcgtgactgggaaaaccctggcgttacccaacttaatcgccttgcagcacatccccctttcgccagctggcgtaatagcgaagaggcccgcaccgatcgcccttcccaacagttgcgcagcctgaatggcgaatggcgcgacgcgccctgtagcggcgcattaagcgcggcgggtgtggtggttacgcgcagcgtgaccgctacacttgccagcgccctagcgcccgctcctttcgctttcttcccttcctttctcgccacgttcgccggctttccccgtcaagctctaaatcgggggctccctttagggttccgatttagtgctttacggcacctcgaccccaaaaaacttgattagggtgatggttcacgtagtgggccatcgccctgatagacggtttttcgccctttgacgttggagtccacgttctttaatagtggactcttgttccaaactggaacaacactcaaccctatctcggtctattcttttgatttataagggattttgccgatttcggcctattggttaaaaaatgagctgatttaacaaaaatttaacgcgaattttaacaaaatattaacgtttacaatttcc

SEQ ID NO: 91 - protein, 474 aa, Artificial Sequence
  Synthetic CAR construct
QVQLVESGGNLVQPGGSLRLSCAASGFTFGSFSMSWVRQAPGGGLEWVAGLSARSSLTHYADSVKGRFTISRDNAKNSVYLQMNSLRVEDTAVYYCARRSYDSSGYWGHFYSYMDVWGQGTLVTVSGGGGSGGGGSGGGGSSVLTQPSSVSAAPGQKVTISCSGSTSNIGNNYVSWYQQHPGKAPKLMIYDVSKRPSGVPDRFSGSKSGNSASLDISGLQSEDEADYYCAAWDDSLSEFLFGTGTKLTVLGTTTPAPRPPTPAPTIASQPLSLRPEACRPAAGGAVHTRGLDFACDIYIWAPLAGTCGVLLLSLVITLYCKRGRKKLLYIFKQPFMRPVQTTQEEDGCSCRFPEEEEGGCELRVKFSRSADAPAYKQGQNQLYNELNLGRREEYDVLDKRRGRDPEMGGKPRRKNPQEGLYNELQKDKMAEAYSEIGMKGERRRGKGHDGLYQGLSTATKDTYDALHMQALPPR

SEQ ID NO: 92 - protein, 442 aa, Artificial Sequence
  Synthetic CAR construct
QVQLVESGGNLVQPGGSLRLSCAASGFTFGSFSMSWVRQAPGGGLEWVAGLSARSSLTHYADSVKGRFTISRDNAKNSVYLQMNSLRVEDTAVYYCARRSYDSSGYWGHFYSYMDVWGQGTLVTVSGGGGSGGGGSGGGGSSVLTQPSSVSAAPGQKVTISCSGSTSNIGNNYVSWYQQHPGKAPKLMIYDVSKRPSGVPDRFSGSKSGNSASLDISGLQSEDEADYYCAAWDDSLSEFLFGTGTKLTVLGESKYGPPCPPCPDIYIWAPLAGTCGVLLLSLVITLYCKRGRKKLLYIFKQPFMRPVQTTQEEDGCSCRFPEEEEGGCELRVKFSRSADAPAYKQGQNQLYNELNLGRREEYDVLDKRRGRDPEMGGKPRRKNPQEGLYNELQKDKMAEAYSEIGMKGERRRGKGHDGLYQGLSTATKDTYDALHMQALPPR

SEQ ID NO: 93 - protein, 5 aa, Artificial Sequence
  Synthetic linker sequence
GGGGS

SEQ ID NO: 94 - protein, 4 aa, Artificial Sequence
  Synthetic linker sequence
GGGS

SEQ ID NO: 95 - protein, 3 aa, Artificial Sequence
  Synthetic linker sequence
GGS

SEQ ID NO: 96 - protein, 2 aa, Artificial Sequence
  Synthetic linker sequence
GS

SEQ ID NO: 97 - protein, 2 aa, Artificial Sequence
  Synthetic linker sequence
  MOD_RES (1)..(1): any amino acid
XS

SEQ ID NO: 98 - protein, 14 aa, Artificial Sequence
  Synthetic linker sequence
LVGEAAAKEAAAKA

SEQ ID NO: 99 - protein, 12 aa, Artificial Sequence
  Synthetic linker sequence
AEAAAKEAAAKA

SEQ ID NO: 100 - protein, 16 aa, Artificial Sequence
  Synthetic linker sequence
EAAAKEAAAKEAAAKA

SEQ ID NO: 101 - protein, 14 aa, Artificial Sequence
  Synthetic linker sequence
EGKSSGSGSESKST

SEQ ID NO: 102 - protein, 12 aa, Artificial Sequence
  Synthetic linker sequence
GSAGSAAGSGEF

SEQ ID NO: 103 - protein, 14 aa, Artificial Sequence
  Synthetic linker sequence
APAPAPAPAPAPAP

SEQ ID NO: 104 - DNA, 7028 bp, Artificial Sequence
  Synthetic CAR construct
tcgagaagcttgccaccatgggtgtccctacccagctcctgggactgctcctgctgtggatcaccgacgccatctgcgacgccgttgtgacccaggaatccgctctgacctcttctccaggcgaaaccgtgactctgacttgccgtagtagcaccggggctgtgaccacatctaactatgccagttgggtccaggaaaaaccggatcacctgtttactggcctgattggcggcaccaacaatcgcgcaccgggtgtgcccgctcgtttcagcggttccctgattggggacaaggcagcactgactatcaccggcgcccagaccgaagatgaggcgatctatttttgcgtcctgtggtacagcgaccattgggtgttcgggggaggcaccaaactgacagtgctgggcggaggaggaggttcaggaggaggaggtagcgggggaggcggttccgggggaggcggttctgatgtgcagctgcaagaatccgggccaggactggttgcgccttctcagagtctgtcaattacatgtactgttagtggctttctgctgaccgactatggtgtgaactgggttcgtcagagcccaggcaagggtctggagtggctgggagtgatttggggggatggaatcacagactacaatagcgcactgaaatctcggctgagtgttaccaaagataacagcaagtcccaggtcttcctgaagatgaacagcctgcaaagcggcgactccgctcgctattactgcgttaccggactgtttgattattgggggcaggggacaactctgactgtttcctccatcgagttcatgtacccccctccctacctggacaacgagagaagcaacggcaccatcatccacatcaaagaaaagcacctgtgccacacccagagcagccccaagctgttctgggccctggtggtggtggccggcgtgctgttctgttacggcctgctggtcacagtggccctgtgcgtgatctggaccaacagcagaagaaacagaggcggccagagcgactacatgaacatgacccccagaaggccaggcctgaccagaaagccctaccagccctacgcccctgccagagacttcgccgcctacagacccagagccaagttcagcagatccgccgagacagccgccaacctgcaggatcccaaccagctgttcaacgagctgaacctgggcagacgggaggaattcgacgtgctggaaaagaagagagccagggaccccgagatgggcggcaagcagcagagaagaagaaaccctcaggaaggcgtctacaacgccctgcagaaagacaagatggccgaggcctacagcgagatcggcaccaagggcgagagaagaaggggcaagggccacgatggcctgttccagggcctgtccaccgccaccaaggacaccttcgacgccctgcacatgcagaccctggcccccagatgagtcgacggtaccgcgggcccgggatccgataaaataaaagattttatttagtctccagaaaaaggggggaatgaaagaccccacctgtaggtttggcaagctagcttaagtaacgccattttgcaaggcatggaaaatacataactgagaatagagaagttcagatcaaggttaggaacagagagacagcagaatatgggccaaacaggatatctgtggtaagcagttcctgccccggctcagggccaagaacagatggtccccagatgcggtcccgccctcagcagtttctagagaaccatcagatgtttccagggtgccccaaggacctgaaaatgaccctgtgccttatttgaactaaccaatcagttcgcttctcgcttctgttcgcgcgcttctgctccccgagctcaataaaagagcccacaacccctcactcggcgcgccagtcctccgatagactgcgtcgcccgggtacccgtgtatccaataaaccctcttgcagttgcatccgacttgtggtctcgctgttccttgggagggtctcctctgagtgattgactacccgtcagcgggggtctttcatgggtaacagtttcttgaagttggagaacaacattctgagggtaggagtcgaatattaagtaatcctgactcaattagccactgttttgaatccacatactccaatactcctgaaatccatcgatggagttcattatggacagcgcagaaagagctggggagaattgtgaaattgttatccgctcacaattccacacaacatacgagccggaagcataaagtgtaaagcctggggtgcctaatgagtgagctaactcacattaattgcgttgcgctcactgcccgctttccagtcgggaaacctgtcgtgccagctgcattaatgaatcggccaacgcgcggggagaggcggtttgcgtattgggcgctcttccgcttcctcgctcactgactcgctgcgctcggtcgttcggctgcggcgagcggtatcagctcactcaaaggcggtaatacggttatccacagaatcaggggataacgcaggaaagaacatgtgagcaaaaggccagcaaaaggccaggaaccgtaaaaaggccgcgttgctggcgtttttccataggctccgcccccctgacgagcatcacaaaaatcgacgctcaagtcagaggtggcgaaacccgacaggactataaagataccaggcgtttccccctggaagctccctcgtgcgctctcctgttccgaccctgccgcttaccggatacctgtccgcctttctcccttcgggaagcgtggcgctttctcatagctcacgctgtaggtatctcagttcggtgtaggtcgttcgctccaagctgggctgtgtgcacgaaccccccgttcagcccgaccgctgcgccttatccggtaactatcgtcttgagtccaacccggtaagacacgacttatcgccactggcagcagccactggtaacaggattagcagagcgaggtatgtaggcggtgctacagagttcttgaagtggtggcctaactacggctacactagaaggacagtatttggtatctgcgctctgctgaagccagttaccttcggaaaaagagttggtagctcttgatccggcaaacaaaccaccgctggtagcggtggtttttttgtttgcaagcagcagattacgcgcagaaaaaaaggatctcaagaagatcctttgatcttttctacggggtctgacgctcagtggaacgaaaactcacgttaagggattttggtcatgagattatcaaaaaggatcttcacctagatccttttaaattaaaaatgaagttttaaatcaatctaaagtatatatgagtaaacttggtctgacagttaccaatgcttaatcagtgaggcacctatctcagcgatctgtctatttcgttcatccatagttgcctgactccccgtcgtgtagataactacgatacgggagggcttaccatctggccccagtgctgcaatgataccgcgagacccacgctcaccggctccagatttatcagcaataaaccagccagccggaagggccgagcgcagaagtggtcctgcaactttatccgcctccatccagtctattaattgttgccgggaagctagagtaagtagttcgccagttaatagtttgcgcaacgttgttgccattgctacaggcatcgtggtgtcacgctcgtcgtttggtatggcttcattcagctccggttcccaacgatcaaggcgagttacatgatcccccatgttgtgcaaaaaagcggttagctccttcggtcctccgatcgttgtcagaagtaagttggccgcagtgttatcactcatggttatggcagcactgcataattctcttactgtcatgccatccgtaagatgcttttctgtgactggtgagtactcaaccaagtcattctgagaatagtgtatgcggcgaccgagttgctcttgcccggcgtcaatacgggataataccgcgccacatagcagaactttaaaagtgctcatcattggaaaacgttcttcggggcgaaaactctcaaggatcttaccgctgttgagatccagttcgatgtaacccactcgtgcacccaactgatcttcagcatcttttactttcaccagcgtttctgggtgagcaaaaacaggaaggcaaaatgccgcaaaaaagggaataagggcgacacggaaatgttgaatactcatactcttcctttttcaatattattgaagcatttatcagggttattgtctcatgagcggatacatatttgaatgtatttagaaaaataaacaaataggggttccgcgcacatttccccgaaaagtgccacctgacgtctaagaaaccattattatcatgacattaacctataaaaataggcgtatcacgaggccctttcgtctcgcgcgtttcggtgatgacggtgaaaacctctgacacatgcagctcccggagacggtcacagcttgtctgtaagcggatgccgggagcagacaagcccgtcagggcgcgtcagcgggtgttggcgggtgtcggggctggcttaactatgcggcatcagagcagattgtactgagagtgcaccatatgcggtgtgaaataccgcacagatgcgtaaggagaaaataccgcatcaggcgccattcgccattcaggctgcgcaactgttgggaagggcgatcggtgcgggcctcttcgctattacgccagctggcgaaagggggatgtgctgcaaggcgattaagttgggtaacgccagggttttcccagtcacgacgttgtaaaacgacggccagtgccacgctctcccttatgcgactcctgcattaggaagcagcccagtagtaggttgaggccgttgagcaccgccgccgcaaggaatggtgcatgcaaggagatggcgcccaacagtcccccggccacggggcctgccaccatacccacgccgaaacaagcgctcatgagcccgaagtggcgagcccgatcttccccatcggtgatgtcggcgatataggcgccagcaaccgcacctgtggcgccggtgatgccggccacgatgcgtccggcgtagaggcgatttaaagacaggatatcagtggtccaggctctagttttgactcaacaatatcaccagctgaagcctatagagtacgagccatagataaaataaaagattttatttagtctccagaaaaaggggggaatgaaagaccccacctgtaggtttggcaagctagcttaagtaacgccattttgcaaggcatggaaaatacataactgagaatagagaagttcagatcaaggttaggaacagagagacagcagaatatgggccaaacaggatatctgtggtaagcagttcctgccccggctcagggccaagaacagatggtccccagatgcggtcccgccctcagcagtttctagagaaccatcagatgtttccagggtgccccaaggacctgaaaatgaccctgtgccttatttgaactaaccaatcagttcgcttctcgcttctgttcgcgcgcttctgctccccgagctcaataaaagagcccacaacccctcactcggcgcgccagtcctccgatagactgcgtcgcccgggtacccgtattcccaataaagcctcttgctgtttgcatccgaatcgtggactcgctgatccttgggagggtctcctcagattgattgactgcccacctcgggggtctttcatttggaggttccaccgagatttggagacccctgcctagggaccaccgacccccccgccgggaggtaagctggccagcggtcgtttcgtgtctgtctctgtctttgtgcgtgtttgtgccggcatctaatgtttgcgcctgcgtctgtactagttagctaactagctctgtatctggcggacccgtggtggaactgacgagttcggaacacccggccgcaaccctgggagacgtcccagggacttcgggggccgtttttgtggcccgacctgagtccaaaaatcccgatcgttttggactctttggtgcaccccccttagaggagggatatgtggttctggtaggagacgagaacctaaaacagttcccgcctccgtctgaatttttgctttcggtttgggaccgaagccgcgccgcgcgtcttgtctgctgcagcatcgttctgtgttgtctctgtctgactgtgtttctgtatttgtctgagaatatgggcccgggctagcctgttaccactcccttaagtttgaccttaggtcactggaaagatgtcgagcggatcgctcacaaccagtcggtagatgtcaagaagagacgttgggttaccttctgctctgcagaatggccaacctttaacgtcggatggccgcgagacggcacctttaaccgagacctcatcacccaggttaagatcaaggtcttttcacctggcccgcatggacacccagaccaggtcccctacatcgtgacctgggaagccttggcttttgacccccctccctgggtcaagccctttgtacaccctaagcctccgcctcctcttcctccatccgccccgtctctcccccttgaacctcctcgttcgaccccgcctcgatcctccctttatccagccctcactccttctctaggcgcccccatatggccatatgagatcttatatggggcacccccgccccttgtaaacttccctgaccctgacatgacaagagttactaacagcccctctctccaagctcacttacaggctctctacttagtccagcacgaagtctggagacctctggcggcagcctaccaagaacaactggaccgaccggtggtacctcacccttaccgagtcggcgacacagtgtgggtccgccgacaccagactaagaacctagaacctcgctggaaaggaccttacacagtcctgctgaccacccccaccgccctcaaagtagacggcatcgcagcttggatacacgccgcccacgtgaaggctgccgaccccgggggtggaccatcctctagactgc

SEQ ID NO: 105 - protein, 14 aa, Artificial Sequence
  Synthetic GCN4 mutant
AYHLENEVARLKKL

SEQ ID NO: 106 - protein, 14 aa, Artificial Sequence
  Synthetic GCN4 mutant
AAHLENEVARLKKL

SEQ ID NO: 107 - protein, 14 aa, Artificial Sequence
  Synthetic GCN4 mutant
AAALENEVARLKKL

SEQ ID NO: 108 - protein, 14 aa, Artificial Sequence
  Synthetic GCN4 mutant
AAAAENEVARLKKL

SEQ ID NO: 109 - protein, 14 aa, Artificial Sequence
  Synthetic GCN4 mutant
NYHLENEVARLKKA

SEQ ID NO: 110 - protein, 14 aa, Artificial Sequence
  Synthetic GCN4 mutant
NYHLENEVARLKAA

SEQ ID NO: 111 - protein, 14 aa, Artificial Sequence
  Synthetic GCN4 mutant
NYHLENEVARLAAA

SEQ ID NO: 112 - protein, 14 aa, Artificial Sequence
  Synthetic GCN4 mutant
NYHLENEVARAAAA

SEQ ID NO: 113 - protein, 18 aa, Artificial Sequence
  Synthetic GCN4 mutant
LLPKNYHLENEVARLKKL

SEQ ID NO: 114 - protein, 18 aa, Artificial Sequence
  Synthetic GCN4 mutant
DLPQKYHLENEVARLKKL

SEQ ID NO: 115 - protein, 487 aa, Artificial Sequence
  Synthetic CAR construct
MALPVTALLLPLALLLHAARPDAVVTQESALTSSPGETVTLTCRSSTGAVTTSNYASWVQEKPDHLFTGLIGGTNNRAPGVPARFSGSLIGDKAALTITGAQTEDEAIYFCVLWYSDHWVFGGGTKLTVLGGGGGSGGGGSGGGGSGGGGSDVQLQESGPGLVAPSQSLSITCTVSGFLLTDYGVNWVRQSPGKGLEWLGVIWGDGITDYNSALKSRLSVTKDNSKSQVFLKMNSLQSGDSARYYCVTGLFDYWGQGTTLTVSSTTTPAPRPPTPAPTIASQPLSLRPEACRPAAGGAVHTRGLDFACDIYIWAPLAGTCGVLLLSLVITLYCKRGRKKLLYIFKQPFMRPVQTTQEEDGCSCRFPEEEEGGCELRVKFSRSADAPAYKQGQNQLYNELNLGRREEYDVLDKRRGRDPEMGGKPRRKNPQEGLYNELQKDKMAEAYSEIGMKGERRRGKGHDGLYQGLSTATKDTYDALHMQALPPR

SEQ ID NO: 116 - protein, 14 aa, Artificial Sequence
  Synthetic linker sequence
LVGEAAAKEAAAKA

SEQ ID NO: 117 - protein, 12 aa, Artificial Sequence
  Synthetic linker sequence
AEAAAKEAAAKA

SEQ ID NO: 118 - DNA, 15 bp, Artificial sequence
  Synthetic linker sequence
ggcgggggcggaagt

SEQ ID NO: 119 - DNA, 30 bp, Artificial Sequence
  Synthetic linker sequence
ggtgggggagggagcggtggaggtggttct

SEQ ID NO: 120 - protein, 12 aa, Artificial Sequence
  Synthetic linker sequence
AEAAAKEAAAKA

SEQ ID NO: 121 - DNA, 36 bp, Artificial Sequence
  Synthetic linker sequence
gcggaagcagccgccaaagaggctgccgcgaaagcg

SEQ ID NO: 122 - protein, 12 aa, Artificial Sequence
  Synthetic linker sequence
GSAGSAAGSGEF

SEQ ID NO: 123 - DNA, 36 bp, Artificial Sequence
  Synthetic linker sequence
ggttccgccggttccgcagccggctccggagagttc

SEQ ID NO: 124 - protein, 18 aa, Artificial Sequence
  Synthetic linker sequence
KESGSVSSEQLAQFRSLD

SEQ ID NO: 125 - DNA, 54 bp, Artificial Sequence
  Synthetic linker sequence
aaggaatccgggagcgtgtcttccgaacagctggctcagttccgcagcctggat

SEQ ID NO: 126 - protein, 14 aa, Artificial Sequence
  Synthetic linker sequence
EGKSSGSGSESKST

SEQ ID NO: 127 - DNA, 42 bp, Artificial Sequence
  Synthetic linker sequence
gaggggaagtcctccggctctgggtccgagtccaagtccaca

SEQ ID NO: 128 - protein, 14 aa, Artificial Sequence
  Synthetic linker sequence
APAPAPAPAPAPAP

SEQ ID NO: 129 - DNA, 42 bp, Artificial Sequence
  Synthetic linker sequence
gctcccgcccctgccccagctcctgcccccgcacccgcaccc

SEQ ID NO: 130 - protein, 2 aa, Artificial Sequence
  Synthetic linker sequence
GG

SEQ ID NO: 131 - DNA, 6 bp, Artificial Sequence
  Synthetic linker sequence
ggcggg

SEQ ID NO: 132 - protein, 18 aa, Artificial Sequence
  Synthetic linker sequence
GSTSGSGKPGSGEGSTKG

SEQ ID NO: 133 - protein, 18 aa, Artificial Sequence
  Synthetic linker sequence
GSTSGSGKPGSGEGSTKG

SEQ ID NO: 134 - protein, 13 aa, Artificial Sequence
  Synthetic linker sequence
ASTKGPSVFPLAP

SEQ ID NO: 135 - protein, 12 aa, Artificial Sequence
  Synthetic linker sequence
TVAAPSVFIFPP

SEQ ID NO: 136 - protein, 6 aa, Artificial Sequence
  Synthetic linker sequence
ASTKGP

SEQ ID NO: 137 - protein, 5 aa, Artificial Sequence
  Synthetic linker sequence
TVAAP

SEQ ID NO: 138 - protein, 14 aa, Artificial Sequence
  Synthetic GNC4 variant
NYHLENEVARLKKL

SEQ ID NO: 139 - protein, 18 aa, Artificial Sequence
  Synthetic GNC4 variant
LLPKNYHLENEVARLKKL

SEQ ID NO: 140 - protein, 18 aa, Artificial Sequence
  Synthetic GNC4 variant
DLPKQYHLENEVARLKKL

SEQ ID NO: 141 - protein, 16 aa, Artificial Sequence
  Synthetic GNC4 variant
LLPKNYHLENEVARLK

SEQ ID NO: 142 - protein, 15 aa, Artificial Sequence
  Synthetic GNC4 variant
LPKNYHLENEVARLK

SEQ ID NO: 143 - protein, 14 aa, Artificial Sequence
  Synthetic GNC4 variant
PKNYHLENEVARLK

SEQ ID NO: 144 - protein, 13 aa, Artificial Sequence
  Synthetic GNC4 variant
KNYHLENEVARLK

SEQ ID NO: 145 - protein, 12 aa, Artificial Sequence
  Synthetic GNC4 variant
NYHLENEVARLK

SEQ ID NO: 146 - protein, 13 aa, Artificial Sequence
  Synthetic GNC4 variant
NYHLENEVARLKA

SEQ ID NO: 147 - protein, 18 aa, Artificial Sequence
  Synthetic GNC4 variant
LLPKNYHLENEVARLKAL

SEQ ID NO: 148 - protein, 15 aa, Artificial Sequence
  Synthetic GNC4 variant
KNYHLENEVARLKAL

SEQ ID NO: 149 - protein, 14 aa, Artificial Sequence
  Synthetic GNC4 variant
NYHLENEVARLKAL

SEQ ID NO: 150 - protein, 14 aa, Artificial Sequence
  Synthetic GNC4 variant
NYHLENEVARLKGL

SEQ ID NO: 151 - protein, 14 aa, Artificial Sequence
  Synthetic GNC4 variant
NYHLENEVARLKAA

SEQ ID NO: 152 - protein, 15 aa, Artificial Sequence
  Synthetic GNC4 variant
KNYHLENEVARLKGL

SEQ ID NO: 153 - protein, 15 aa, Artificial Sequence
  Synthetic GNC4 variant
KNYHLENEVARLKAA

SEQ ID NO: 154 - protein, 15 aa, Artificial Sequence
  Synthetic GNC4 variant
KNYHLENEVARLKKL

SEQ ID NO: 155 - protein, 15 aa, Artificial Sequence
  Synthetic GNC4 variant
KNYHLENEVARLKAL

SEQ ID NO: 156 - protein, 15 aa, Artificial Sequence
  Synthetic GNC4 variant
KNYHLENEVARLKGL

SEQ ID NO: 157 - protein, 15 aa, Artificial Sequence
  Synthetic GNC4 variant
KNYHLENEVARLKAA

SEQ ID NO: 158 - protein, 15 aa, Artificial Sequence
  Synthetic GNC4 variant
KNYHLENEVARLKGG

SEQ ID NO: 159 - protein, 14 aa, Artificial Sequence
  Synthetic GNC4 variant
NYHLENEVARLKKL

SEQ ID NO: 160 - protein, 14 aa, Artificial Sequence
  Synthetic GNC4 variant
NYHLENEVARLKAL

SEQ ID NO: 161 - protein, 14 aa, Artificial Sequence
  Synthetic GNC4 variant
NYHLENEVARLKGL

SEQ ID NO: 162 - protein, 14 aa, Artificial Sequence
  Synthetic GNC4 variant
NYHLENEVARLKAA

SEQ ID NO: 163 - protein, 14 aa, Artificial Sequence
  Synthetic GNC4 variant
NYHLENEVARLKGG

SEQ ID NO: 164 - protein, 16 aa, Artificial Sequence
  Synthetic linker sequence
EAAAKEAAAKEAAAKA

SEQ ID NO: 165 - protein, 45 aa, Artificial Sequence
  Synthetic hinge sequence
TTTPAPRPPTPAPTIASQPLSLRPEACRPAAGGAVHTRGLDFACD

SEQ ID NO: 166 - protein, 1 aa, Artificial Sequence
  Synthetic hinge sequence
D

SEQ ID NO: 167 - protein, 12 aa, Artificial Sequence
  Synthetic hinge sequence
ESKYGPPCPSCP

SEQ ID NO: 168 - protein, 12 aa, Artificial Sequence
  Synthetic hinge sequence
ESKYGPPCPPCP

SEQ ID NO: 169 - protein, 237 aa, Artificial Sequence
  Made in lab - humanized GCN4 scFv
QAVVTQEPSLTVSPGGTVTLTCGSSTGAVTTSNYASWVQQKPGQAPRGLIGGTNNRAPGVPARFSGSLLGGKAALTISGAQPEDEAEYYCVLWYSDHWVFGGGTKLTVLGGGGSGGGGSGGGGSQVQLQESGPGLVKPSETLSLTCTVSGFLLTDYGVNWIRQPPGKGLEWIGVIWGDGITDYNPSLKSRVTISKDTSKNQFSLKLSSVTAADTAVYYCVTGLFDYWGQGTLVTVSS

SEQ ID NO: 170 - protein, 237 aa, Artificial Sequence
  Made in lab - humanized GCN4 scFv
QAVVTQEPSLTVSPGGTVTLTCGSSTGAVTTSNYASWVQQKPGQAPRGLIGGTNNRAPGVPARFSGSLLGGKAALTISGAQPEDEAEYYCVLWYSDHWVFGGGTKLTVLGGGGSGGGGSGGGGSQVQLQESGPGLVKPSETLSITCTVSGFLLTDYGVNWVRQPPGKGLEWLGVIWGDGITDYNPSLKSRLTVSKDTSKNQVSLKMSSLTAADTAVYYCVTGLFDYWGQGTLLTVSS

SEQ ID NO: 171 - protein, 237 aa, Artificial Sequence
  Made in lab - humanized GCN4 scFv
QAVVTQEPSLTVSPGGTVTLTCGSSTGAVTTSNYASWVQQKPGQAFRGLIGGTNNRAPGVPARFSGSLLGGKAALTISGAQPEDEAEYYCVLWYSDHWVFGGGTKLTVLGGGGSGGGGSGGGGSQVQLQESGPGLVKPSETLSLTCTVSGFLLTDYGVNWIRQPPGKGLEWIGVIWGDGITDYNPSLKSRVTISKDTSKNQFSLKLSSVTAADTAVYYCVTGLFDYWGQGTLVTVSS

SEQ ID NO: 172 - protein, 237 aa, Artificial Sequence
  Made in lab - humanized GCN4 scFv
QAVVTQEPSLTVSPGGTVTLTCGSSTGAVTTSNYASWVQQKPGQAFRGLIGGTNNRAPGVPARFSGSLLGGKAALTISGAQPEDEAEYYCVLWYSDHWVFGGGTKLTVLGGGGSGGGGSGGGGSQVQLQESGPGLVKPSETLSITCTVSGFLLTDYGVNWVRQPPGKGLEWLGVIWGDGITDYNPSLKSRLTVSKDTSKNQVSLKMSSLTAADTAVYYCVTGLFDYWGQGTLLTVSS

SEQ ID NO: 173 - protein, 237 aa, Artificial Sequence
  Made in lab - humanized GCN4 scFv
QAVVTQEPSLTVSPGGTVTLTCGSSTGAVTTSNYASWVQQKPDHLFRGLIGGTNNRAPGVPARFSGSLLGGKAALTISGAQPEDEAEYYCVLWYSDHWVFGGGTKLTVLGGGGSGGGGSGGGGSQVQLQESGPGLVKPSETLSLTCTVSGFLLTDYGVNWIRQPPGKGLEWIGVIWGDGITDYNPSLKSRVTISKDTSKNQFSLKLSSVTAADTAVYYCVTGLFDYWGQGTLVTVSS

SEQ ID NO: 174 - protein, 237 aa, Artificial Sequence
  Made in lab - humanized GCN4 scFv
QAVVTQEPSLTVSPGGTVTLTCGSSTGAVTTSNYASWVQQKPDHLFRGLIGGTNNRAPGVPARFSGSLLGGKAALTISGAQPEDEAEYYCVLWYSDHWVFGGGTKLTVLGGGGSGGGGSGGGGSQVQLQESGPGLVKPSETLSITCTVSGFLLTDYGVNWVRQPPGKGLEWLGVIWGDGITDYNPSLKSRLTVSKDTSKNQVSLKMSSLTAADTAVYYCVTGLFDYWGQGTLLTVSS

SEQ ID NO: 175 - DNA, 1443 bp, Artificial Sequence; identical to SEQ ID NO: 70
  Made in lab - humanized GCN4 scFv

SEQ ID NO: 176 - DNA, 1443 bp, Artificial Sequence; identical to SEQ ID NO: 71
  Made in lab - humanized GCN4 scFv

SEQ ID NO: 177 - DNA, 1443 bp, Artificial Sequence; identical to SEQ ID NO: 72
  Made in lab - humanized GCN4 scFv

SEQ ID NO: 178 - DNA, 1443 bp, Artificial Sequence; identical to SEQ ID NO: 73
  Made in lab - humanized GCN4 scFv

SEQ ID NO: 179 - DNA, 1443 bp, Artificial Sequence; identical to SEQ ID NO: 74
  Made in lab - humanized GCN4 scFv

SEQ ID NO: 180 - DNA, 1443 bp, Artificial Sequence; identical to SEQ ID NO: 75
  Made in lab - humanized GCN4 scFv

SEQ ID NO: 181 - DNA, 1329 bp, Artificial Sequence; identical to SEQ ID NO: 77
  Synthetic CAR construct

SEQ ID NO: 182 - DNA, 1365 bp, Artificial Sequence; identical to SEQ ID NO: 68
  Synthetic CAR construct

SEQ ID NO: 183 - DNA, 1365 bp, Artificial Sequence; identical to SEQ ID NO: 69
  Synthetic CAR construct

SEQ ID NO: 184 - DNA, 642 bp, Artificial Sequene
  Made in Lab - antibody fragment
gacatccagatgacacagactacatcctccctgtctgcctctctgggagacagagtcaccatcagttgcagggcaagtcaggacattagtaaatatttaaattggtatcagcagaaaccagatggaactgttaaactcctgatctaccatacatcaagattacactcaggagtcccatcaaggttcagtggcagtgggtctggaacagattattctctcaccattagcaacctggagcaagaagatattgccacttacttttgccaacagggtaatacgcttccgtacacgttcggaggggggaccaagcttgagatcaaacgaactgtggctgcaccatctgtcttcatcttcccgccatctgatgagcagttgaaatctggaactgcctctgtcgtgtgcctgctgaataacttctatcccagagaggccaaagtacagtggaaggtggataacgccctccaatcgggtaactcccaggagagtgtcacagagcaggacagcaaggacagcacctacagcctcagcagcaccctgacgctgagcaaagcagactacgagaaacacaaagtctacgcctgcgaagtcacccatcagggcctgtcctcgcccgtcacaaagagcttcaacaggggagagtgt

SEQ ID NO: 185 - DNA, 669 bp, Artificial Sequence
  Made in Lab - antibody fragment
gaggtgaaactgcaggagtcaggacctggcctggtggcgccctcacagagcctgtccgtcacatgcactgtctcaggggtctcattacccgactatggtgtaagctggattcgccagcctccacgaaagggtctggagtggctgggagtaatatggggtagtgaaaccacatactataattcagctctcaaatccagactgaccatcatcaaggacaactccaagagccaagttttcttaaaaatgaacagtctgcaaactgatgacacagccatttactactgtgccaaacattattactacggtggtagctatgctatggactactggggccaaggaacctcagtcaccgtctcctcagcctccaccaagggcccatcggtcttccccctggcaccctcctccaagagcacctctgggggcacagcggccctgggctgcctggtcaaggactacttccccgaaccggtgacggtgtcgtggaactcaggcgccctgaccagcggcgtgcacaccttcccggctgtcctacagtcctcaggactctactccctcagcagcgtggtgactgtgccctctagcagcttgggcacccagacctacatctgcaacgtgaatcacaagcccagcaacaccaaggtggacaagaaagttgagcccaaatcttgt

SEQ ID NO: 186 - DNA, 1347 bp, Artificial Sequence
  Made in Lab - antibody fragment
gaggtgaaactgcaggagtcaggacctggcctggtggcgccctcacagagcctgtccgtcacatgcactgtctcaggggtctcattacccgactatggtgtaagctggattcgccagcctccacgaaagggtctggagtggctgggagtaatatggggtagtgaaaccacatactataattcagctctcaaatccagactgaccatcatcaaggacaactccaagagccaagttttcttaaaaatgaacagtctgcaaactgatgacacagccatttactactgtgccaaacattattactacggtggtagctatgctatggactactggggccaaggaacctcagtcaccgtctcctcagcctccaccaagggcccatcggtcttccccctggcaccctcctccaagagcacctctgggggcacagcggccctgggctgcctggtcaaggactacttccccgaaccggtgacggtgtcgtggaactcaggcgccctgaccagcggcgtgcacaccttcccggctgtcctacagtcctcaggactctactccctcagcagcgtggtgactgtgccctctagcagcttgggcacccagacctacatctgcaacgtgaatcacaagcccagcaacaccaaggtggacaagaaagttgagcccaaatcttgtgacaaaactcacacatgcccaccgtgcccagcacctccagtcgccggaccgtcagtcttcctcttccctccaaaacccaaggacaccctcatgatctcccggacccctgaggtcacatgcgtggtggtggacgtgagccacgaagaccctgaggtcaagttcaactggtacgtggacggcgtggaggtgcataatgccaagacaaagccgcgggaggagcagtacaacagcacgtaccgtgtggtcagcgtcctcaccgtcctgcaccaggactggctgaatggcaaggagtacaagtgcaaggtctccaacaaaggcctcccaagctccatcgagaaaaccatctccaaagccaaagggcagccccgagaaccacaggtgtacaccctgcctccatcccgggatgagctgaccaagaaccaggtcagcctgacctgcctggtcaaaggcttctatcccagcgacatcgccgtggagtgggagagcaatgggcagccggagaacaactacaagaccacgcctcccgtgctggactccgacggctccttcttcctctacagcaagctcaccgtggacaagagcaggtggcagcaggggaacgtcttctcatgctccgtgatgcatgaggctctgcacaaccactacacgcagaagagcctctccctgtctccgggtaaa

SEQ ID NO: 187 - DNA, 711 bp, Artificial Sequence
  Made in Lab - antibody fragment
atgaaaaagaatatcgcatttcttcttgctagcatgttcgttttttctattgctacaaacgcatacgctgacatccagatgacccagtctccatcctccctgtctgcatctgtaggagacagagtcaccatcacttgccgggcaagtcaggatgtgaataccgcggtcgcatggtatcagcagaaaccagggaaagcccctaagctcctgatctattctgcatccttcttgtatagtggggtcccatcaaggttcagtggcagtagatctgggacagatttcactctcaccatcagcagtctgcaacctgaagattttgcaacttactactgtcaacagcattacactacccctccgacgttcggccaaggtaccaagcttgagatcaaacgaactgtggctgcaccatctgtcttcatcttcccgccatctgatgagcagttgaaatctggaactgcctctgtcgtgtgcctgctgaataacttctatcccagagaggccaaagtacagtggaaggtggataacgccctccaatcgggtaactcccaggagagtgtcacagagcaggacagcaaggacagcacctacagcctcagcagcaccctgacgctgagcaaagcagactacgagaaacacaaagtctacgcctgcgaagtcacccatcagggcctgtcctcgcccgtcacaaagagcttcaacaggggagagtgt

SEQ ID NO: 188 - DNA, 753 bp, Artificial Sequence
  Made in Lab - antibody fragment
atgaaaaagaatatcgcatttcttcttgcatctatgttcgttttttctattgctacaaacgcgtacgctgaggtgcagctggtggagtctggaggaggcttggtccagcctggggggtccctgagactctcctgtgcagcctctgggttcaatattaaggacacttacatccactgggtccgccaggctccagggaaggggctggagtgggtcgcacgtatttatcctaccaatggttacacacgctacgcagactccgtgaagggccgattcaccatctccgcagacacttccaagaacacggcgtatcttcaaatgaacagcctgagagccgaggacacggccgtgtattactgttcgagatggggcggtgacggcttctatgccatggactactggggccaaggaaccctggtcaccgtctcctcagcctccaccaagggcccatcggtcttccccctggcaccctcctccaagagcacctctgggggcacagcggccctgggctgcctggtcaaggactacttccccgaaccggtgacggtgtcgtggaactcaggcgccctgaccagcggcgtgcacaccttcccggctgtcctacagtcctcaggactctactccctcagcagcgtggtgactgtgccctctagcagcttgggcacccagacctacatctgcaacgtgaatcacaagcccagcaacaccaaggtggacaagaaagttgagcccaaatcttgtgacaaaactcacaca

SEQ ID NO: 189 - DNA, 708 bp, Artificial Sequence
  Made in Lab - antibody fragment
atgaaaaagaatatcgcatttcttcttgctagcatgttcgttttttctattgctacaaacgcatacgctcagattgtgctgagccagagcccggcgattctgagcgcgagcccgggcgaaaaagtgaccatgacctgccgcgcgagcagcagcgtgagctatattcattggtttcagcagaaaccgggcagcagcccgaaaccgtggatttatgcgaccagcaacctggcgagcggcgtgccggtgcgctttagcggcagcggcagcggcaccagctatagcctgaccattagccgcgtggaagcggaagatgcggcgacctattattgccagcagtggaccagcaacccgccgacctttggcggcggcaccaagcttgagatcaaacgaactgtggctgcaccatctgtcttcatcttcccgccatctgatgagcagttgaaatctggaactgcctctgtcgtgtgcctgctgaataacttctatcccagagaggccaaagtacagtggaaggtggataacgccctccaatcgggtaactcccaggagagtgtcacagagcaggacagcaaggacagcacctacagcctcagcagcaccctgacgctgagcaaagcagactacgagaaacacaaagtctacgcctgcgaagtcacccatcagggcctgtcctcgcccgtcacaaagagcttcaacaggggagagtgt

SEQ ID NO: 190 - DNA, 756 bp, Artificial Sequence
  Made in Lab - antibody fragment
atgaaaaagaatatcgcatttcttcttgcatctatgttcgttttttctattgctacaaacgcgtacgctcaggtgcagctgcagcagccgggcgcggaactggtgaaaccgggcgcgagcgtgaaaatgagctgcaaagcgagcggctatacctttaccagctataacatgcattgggtgaaacagaccccgggccgcggcctggaatggattggcgcgatttatccgggcaacggcgataccagctataaccagaaatttaaaggcaaagcgaccctgaccgcggataaaagcagcagcaccgcgtatatgcagctgagcagcctgaccagcgaagatagcgcggtgtattattgcgcgcgcagcacctattatggcggcgattggtattttaacgtgtggggcgcgggcaccaccgtgaccgtgagcgcggcgagcaccaagggcccatcggtcttccccctggcaccctcctccaagagcacctctgggggcacagcggccctgggctgcctggtcaaggactacttccccgaaccggtgacggtgtcgtggaactcaggcgccctgaccagcggcgtgcacaccttcccggctgtcctacagtcctcaggactctactccctcagcagcgtggtgactgtgccctctagcagcttgggcacccagacctacatctgcaacgtgaatcacaagcccagcaacaccaaggtggacaagaaagttgagcccaaatcttgtgacaaaactcacaca

SEQ ID NO: 191 - DNA, 708 bp, Artificial Sequence
  Made in Lab - antibody fragment
atgagggtccccgctcagctcctggggctcctgctgctctggctcccaggtgcacgatgtgacatcctgctgacccagtcccccgtgatcctgtccgtgtcccctggcgagcgggtgtccttctcctgccgggcctcccagtccatcggcaccaacatccactggtatcagcagcggaccaacggctcccctcggctgctgatcaagtacgcctccgagtctatctccggcatcccttcccggttctccggctccggctctggcaccgacttcaccctgtccatcaactccgtggagtccgaggatatcgccgactactactgccagcagaacaacaactggcctaccaccttcggcgctggaaccaagctggagctgaagcgtacggtggctgcaccatctgtcttcatcttcccgccatctgatgagcagttgaaatctggaactgcctctgttgtgtgcctgctgaataacttctatcccagagaggccaaagtacagtggaaggtggataacgccctccaatcgggtaactcccaggagagtgtcacagagcaggacagcaaggacagcacctacagcctcagcagcaccctgacgctgagcaaagcagactacgagaaacacaaagtctacgcctgcgaagtcacccatcagggcctgagctcgcccgtcacaaagagcttcaacaggggagagtgttgatga

SEQ ID NO: 192 - DNA, 753 bp, Artificial Sequence
  Made in Lab - antibody fragment
atgggttggagcctcatcttgctcttccttgtcgctgttgctacgcgtgtccactcccaggtgcagctgaagcagtccggccctggcctggtgcagccttcccagtccctgtccatcacctgcaccgtgtccggcttctccctgaccaactacggcgtgcactgggtgcgccagtcccccggcaagggcctggagtggctgggcgtgatctggtccggcggcaacaccgactacaacacccctttcacctcccggctgtccatcaacaaggacaactccaagtcccaggtgttcttcaagatgaactccctgcagtccaacgacaccgccatctactactgcgccagagccctgacctactatgactacgagttcgcctactggggccagggcaccctggtgaccgtgtccgccgctagcaccaagggcccatcggtcttccccctggcaccctcctccaagagcacctctgggggcacagcggccctgggctgcctggtcaaggactacttccccgaaccggtgacggtgtcgtggaactcaggcgccctgaccagcggcgtgcacaccttcccggctgtcctacagtcctcaggactctactccctcagcagcgtggtgaccgtgccctccagcagcttgggcacccagacctacatctgcaacgtgaatcacaagcccagcaacaccaaggtggacaagaaagttgagcccaaatcttgtgacaaaactcacacatgcccaccgtgccca

SEQ ID NO: 193 - DNA, 678 bp, Artificial Sequence
  Made in Lab - antibody fragment
gatatccagctgcaggagtccggaccaggtctggtgaagcccagccagtccctgtctctgacctgcagcgtcactggctattccatcaccagtgcatactattggaactggatcagacagttccctggaaacaaactggagtggatggggtacatctcttacgacggtagaaacaactacaaccccagcctcaaaaacaggattagcattacccgcgacactagtaagaaccagtttttcctgaagctcaacagtgtgacaactgaggacactgctacttattattgtgccaaggagggcgactatgatgtcggcaattattacgctatggactattggggtcaggggactagcgtgaccgtcagttctgccaggaccaaaggaccgtccgtctttcctctggccccttcctctaagtccacaagcggtgggaccgcagcactgggatgcctggtgaaggattacttccctgagccggtgaccgtgtcctggaactccggagctctcacctccggtgtccatacctttcctgccgtcctgcagtcctccggcctgtacagcctctctagcgtcgtgactgtgccctccagctccctgggcacccaaacttatatctgcaatgttaaccacaagccttctaataccaaggtcgacaagaaagtggagccgaagagctgt

SEQ ID NO: 194 - DNA, 645 bp, Artificial Sequence
  Made in Lab - antibody fragment
gaaaacgtgctcacccagagtcccgccatcatgagcgccagtcccggcgagaaggtgaccatgacctgtagggcctcttccaatgtgatctctagctacgtgcattggtaccagcagcgtagtggggccagccctaagctctggatttactccacctccaacctggcctccggggtccccgcccgtttctctggcagtggctctggtacctcttactccctgactatcagcagcgtcgaggccgaggatgccgctacatactactgtcagcagtacagtggataccctctgaccttcggggctggcaccaagctggagctgaagcgcgctgccgccgcccccagtgtcttcattttccccccttccgatgagcagctgaagagcggtacagcctctgttgtttgtctgctgaacaacttctatccacgcgaggccaaggtgcagtggaaagttgataacgcgctgcagagtggcaactcccaggagtctgtgacagagcaggacagtaaagacagcacatattccctgtctagcacactgactctgtccaaggctgactatgagaagcacaaggtgtacgcttgcgaggtcacccaccagggactgagttctcctgtgaccaagtccttcaatcgcggcgagtgt

SEQ ID NO: 195 - DNA, 654 bp, Artificial Sequence
  Made in Lab - antibody fragment
gatattcagatgacccagagcccgagcagcctgagcgcgagcgtgggcgatcgcgtgaccattacctgccgcgcgagcgaaagcgtggataactatggcattagctttatgaactggtttcagcagaaaccgggcaaagcgccgaaactgctgatttatgcggcgagcaaccagggcagcggcgtgccgagccgctttagcggcagcggcagcggcaccgattttaccctgaacattagcagcctgcagccggatgattttgcgacctattattgccagcagagcaaagaagtgccgtggacctttggccagggcaccaaagtggaaattaaacgaactgtggctgcaccatctgtcttcatcttcccgccatctgatgagcagttgaaatctggaactgcctctgttgtgtgcctgctgaataacttctatcccagagaggccaaagtacagtggaaggtggataacgccctccaatcgggtaactcccaggagagtgtcacagagcaggacagcaaggacagcacctacagcctcagcagcaccctgacgctgagcaaagcagactacgagaaacacaaagtctacgcctgcgaagtcacccatcagggcctgagctcgcccgtcacaaagagcttcaacaggggagagtgt

SEQ ID NO: 196 - DNA, 690 bp, Artificial Sequence
  Made in Lab - antibody fragment
caggtgcagctggtgcagagcggcgcggaagtgaaaaaaccgggcagcagcgtgaaagtgagctgcaaagcgagcggctatacctttaccgattataacatgcattgggtgcgccaggcgccgggccagggcctggaatggattggctatatttatccgtataacggcggcaccggctataaccagaaatttaaaagcaaagcgaccattaccgcggatgaaagcaccaacaccgcgtatatggaactgagcagcctgcgcagcgaagataccgcggtgtattattgcgcgcgcggccgcccggcgatggattattggggccagggcaccctggtgaccgtgagcagcgcctccaccaagggcccatcggtcttccccctggcaccctcctcctagagcacctctgggggcacagcggccctgggctgcctggtcaaggactacttccccgaaccggtgacggtgtcgtggaactcaggcgccctgaccagcggcgtgcacaccttcccggctgtcctacagtcctcaggactctactccctcagcagcgtggtgaccgtgccctccagcagcttgggcacccagacctacatctgcaacgtgaatcacaagcccagcaacaccaaggtcgacaagaaagttgagcccaaatcttgtggtggcggtcaccatcaccatcatcaccaccac

SEQ ID NO: 197 - protein, 107 aa, Artificial Sequence
  Made in Lab - antibody fragment
DIQMTQSPSSLSASVGDRVTITCKASQDVGIAVAWYQQKPGKVPKLLIYWASTRHTGVPDRFSGSGSGTDFTLTISSLQPEDVATYYCQQYSSYPYTFGQGTKLEIK

SEQ ID NO: 198 - protein, 222 aa, Artificial Sequence
  Made in Lab - antibody fragment
EVQLVESGGGLVQPGGSLRLSCAASGFDFSRYWMSWVRQAPGKGLEWIGEINPDSSTINYAPSLKDKFIISRDNAKNSLYLQMNSLRAEDTAVYYCARPDGNYWYFDVWGQGTLVTVSSASTKGPSVFPLAPSSKSTSGGTAALGCLVKDYFPEPVTVSWNSGALTSGVHTFPAVLQSSGLYSLSSVVTVPSSSLGTQTYICNVNHKPSNTKVDKKVEPKSC

SEQ ID NO: 199 - protein, 214 aa, Artificial Sequence
  Made in Lab - antibody fragment
DIQMTQSPSSMSVSVGDRVTITCHSSQDINSNIGWLQQKPGKSFKGLIYHGTNLDDGVPSRFSGSGSGTDYTLTISSLQPEDFATYYCVQYAQFPWTFGGGTKLEIKRTVAAPSVFIFPPSDEQLKSGTASVVCLLNNFYPREAKVQWKVDNALQSGNSQESVTEQDSKDSTYSLSSTLTLSKADYEKHKVYACEVTHQGLSSPVTKSFNRGEC

SEQ ID NO: 200 - protein, 217 aa, Artificial Sequence
  Made in Lab - antibody fragment
QLQESGPGLVKPSQTLSLTCTVSGYSISSDFAWNWIRQPPGKGLEWMGYISYSGNTRYQPSLKSRITISRDTSKNQFFLKLNSVTAADTATYYCVTAGRGFPYWGQGTLVTVSSASTKGPSVFPLAPSSKSTSGGTAALGCLVKDYFPEPVTVSWNSGALTSGVHTFPAVLQSSGLYSLSSVVTVPSSSLGTQTYICNVNHKPSNTKVDKKVEPKSC

SEQ ID NO: 201 - protein, 214 aa, Artificial Sequence
  Made in Lab - antibody fragment
DIQMTQSPSSLSASVGDRVTITCRANQGISNNLNWYQQKPGKAPKPLIYYTSNLQSGVPSRFSGSGSGTDYTLTISSLQPEDFATYYCQQFTSLPYTFGQGTKLEIKRTVAAPSVFIFPPSDEQLKSGTASVVCLLNNFYPREAKVQWKVDNALQSGNSQESVTEQDSKDSTYSLSSTLTLSKADYEKHKVYACEVTHQGLSSPVTKSFNRGEC

SEQ ID NO: 202 - protein, 224 aa, Artificial Sequence
  Made in Lab - antibody fragment
EVQLVESGGGLVQPGGSLRLSCAASGFTFSNFDMAWVRQAPGKGLVWVSSITTGGGDTYYADSVKGRFTISRDNAKSTLYLQMDSLRSEDTAVYYCVRHGYYDGYHLFDYWGQGTLVTVSSASTKGPSVFPLAPSSKSTSGGTAALGCLVKDYFPEPVTVSWNSGALTSGVHTFPAVLQSSGLYSLSSVVTVPSSSLGTQTYICNVNHKPSNTKVDKKVEPKSC

SEQ ID NO: 203 - protein, 214 aa, Artificial Sequence
  Made in Lab - antibody fragment
DIQMTQTTSSLSASLGDRVTISCRASQDISKYLNWYQQKPDGTVKLLIYHTSRLHSGVPSRFSGSGSGTDYSLTISNLEQEDIATYFCQQGNTLPYTFGGGTKLEIKRTVAAPSVFIFPPSDEQLKSGTASVVCLLNNFYPREAKVQWKVDNALQSGNSQESVTEQDSKDSTYSLSSTLTLSKADYEKHKVYACEVTHQGLSSPVTKSFNRGEC

SEQ ID NO: 204 - protein, 449 aa, Artificial Sequence
  Made in Lab - antibody fragment
EVKLQESGPGLVAPSQSLSVTCTVSGVSLPDYGVSWIRQPPRKGLEWLGVIWGSETTYYNSALKSRLTIIKDNSKSQVFLKMNSLQTDDTAIYYCAKHYYYGGSYAMDYWGQGTSVTVSSASTKGPSVFPLAPSSKSTSGGTAALGCLVKDYFPEPVTVSWNSGALTSGVHTFPAVLQSSGLYSLSSVVTVPSSSLGTQTYICNVNHKPSNTKVDKKVEPKSCDKTHTCPPCPAPPVAGPSVFLFPPKPKDTLMISRTPEVTCVVVDVSHEDPEVKFNWYVDGVEVHNAKTKPREEQYNSTYRVVSVLTVLHQDWLNGKEYKCKVSNKGLPSSIEKTISKAKGQPREPQVYTLPPSRDELTKNQVSLTCLVKGFYPSDIAVEWESNGQPENNYKTTPPVLDSDGSFFLYSKLTVDKSRWQQGNVFSCSVMHEALHNHYTQKSLSLSPGK

SEQ ID NO: 205 - protein, 223 aa, Artificial Sequence
  Made in Lab - antibody fragment
EVKLQESGPGLVAPSQSLSVTCTVSGVSLPDYGVSWIRQPPRKGLEWLGVIWGSETTYYNSALKSRLTIIKDNSKSQVFLKMNSLQTDDTAIYYCAKHYYYGGSYAMDYWGQGTSVTVSSASTKGPSVFPLAPSSKSTSGGTAALGCLVKDYFPEPVTVSWNSGALTSGVHTFPAVLQSSGLYSLSSVVTVPSSSLGTQTYICNVNHKPSNTKVDKKVEPKSC

SEQ ID NO: 206 - protein, 450 aa, Artificial Sequence
  Made in Lab - antibody fragment
EVQLVESGGGLVQPGGSLRLSCAASGFTFSNFDMAWVRQAPGKGLVWVSSITTGGGDTYYADSVKGRFTISRDNAKSTLYLQMDSLRSEDTAVYYCVRHGYYDGYHLFDYWGQGTLVTVSSASTKGPSVFPLAPSSKSTSGGTAALGCLVKDYFPEPVTVSWNSGALTSGVHTFPAVLQSSGLYSLSSVVTVPSSSLGTQTYICNVNHKPSNTKVDKKVEPKSCDKTHTCPPCPAPPVAGPSVFLFPPKPKDTLMISRTPEVTCVVVDVSHEDPEVKFNWYVDGVEVHNAKTKPREEQYNSTYRVVSVLTVLHQDWLNGKEYKCKVSNKGLPSSIEKTISKAKGQPREPQVYTLPPSRDELTKNQVSLTCLVKGFYPSDIAVEWESNGQPENNYKTTPPVLDSDGSFFLYSKLTVDKSRWQQGNVFSCSVMHEALHNHYTQKSLSLSPGK

SEQ ID NO: 207 - DNA, 4137 bp, Artificial Sequence
  Made in Lab - antibody fragment
ggatctgcgatcgctccggtgcccgtcagtgggcagagcgcacatcgcccacagtccccgagaagttggggggaggggtcggcaattgaacgggtgcctagagaaggtggcgcggggtaaactgggaaagtgatgtcgtgtactggctccgcctttttcccgagggtgggggagaaccgtatataagtgcagtagtcgccgtgaacgttctttttcgcaacgggtttgccgccagaacacagctgaagcttcgaggggctcgcatctctccttcacgcgcccgccgccctacctgaggccgccatccacgccggttgagtcgcgttctgccgcctcccgcctgtggtgcctcctgaactgcgtccgccgtctaggtaagtttaaagctcaggtcgagaccgggcctttgtccggcgctcccttggagcctacctagactcagccggctctccacgctttgcctgaccctgcttgctcaactctacgtctttgtttcgttttctgttctgcgccgttacagatccaagctgtgaccggcgcctacctgagatcaccggcgaaggagggccaccatgtacaggatgcaactcctgtcttgcattgcactaagtcttgcacttgtcacgaattcggacattcagctgacccagtctccagcttccctgtctacatctctgggagaaactgtcaccatccaatgtcaagcaagtgaggacatttacagtggtttagcgtggtatcagcagaagccagggaaatctcctcagctcctgatctatggtgcaagtgacttacaagacggcgtcccatcacgattcagtggcagtggatctggcacacagtattctctcaagatcaccagcatgcaaactgaagatgaaggggtttatttctgtcaacagggtttaacgtatcctcggacgttcggtggcggcaccaagctggaaatcaaacgaactgtggctgcaccatctgtcttcatcttcccgccatctgatgagcagttgaaatctggaactgcctctgtcgtgtgcctgctgaataacttctatcccagagaggccaaagtacagtggaaggtggataacgccctccaatcgggtaactcccaggagagtgtcacagagcaggacagcaaggacagcacctacagcctcagcagcaccctgacgctgagcaaagcagactacgagaaacacaaagtctacgcctgcgaagtcacccatcagggcctgtcctcgcccgtcacaaagagcttcaacaggggagagtgttgataagtgctagctggccagacatgataagatacattgatgagtttggacaaaccacaactagaatgcagtgaaaaaaatgctttatttgtgaaatttgtgatgctattgctttatttgtaaccattataagctgcaataaacaagttaacaacaacaattgcattcattttatgtttcaggttcagggggaggtgtgggaggttttttaaagcaagtaaaacctctacaaatgtggtatggaattaattctaaaatacagcatagcaaaactttaacctccaaatcaagcctctacttgaatccttttctgagggatgaataaggcataggcatcaggggctgttgccaatgtgcattagctgtttgcagcctcaccttctttcatggagtttaagatatagtgtattttcccaaggtttgaactagctcttcatttctttatgttttaaatgcactgacctcccacattccctttttagtaaaatattcagaaataatttaaatacatcattgcaatgaaaataaatgttttttattaggcagaatccagatgctcaaggcccttcataatatcccccagtttagtagttggacttagggaacaaaggaacctttaatagaaattggacagcaagaaagcgagcttctagcttatcctcagtcctgctcctctgccacaaagtgcacgcagttgccggccgggtcgcgcagggcgaactcccgcccccacggctgctcgccgatctcggtcatggccggcccggaggcgtcccggaagttcgtggacacgacctccgaccactcggcgtacagctcgtccaggccgcgcacccacacccaggccagggtgttgtccggcaccacctggtcctggaccgcgctgatgaacagggtcacgtcgtcccggaccacaccggcgaagtcgtcctccacgaagtcccgggagaacccgagccggtcggtccagaactcgaccgctccggcgacgtcgcgcgcggtgagcaccggaacggcactggtcaacttggccatgatggctcctcctgtcaggagaggaaagagaagaaggttagtacaattgctatagtgagttgtattatactatgcagatatactatgccaatgattaattgtcaaactagggctgcagggttcatagtgccacttttcctgcactgccccatctcctgcccaccctttcccaggcatagacagtcagtgacttaccaaactcacaggagggagaaggcagaagcttgagacagacccgcgggaccgccgaactgcgaggggacgtggctagggcggcttcttttatggtgcgccggccctcggaggcagggcgctcggggaggcctagcggccaatctgcggtggcaggaggcggggccgaaggccgtgcctgaccaatccggagcacataggagtctcagccccccgccccaaagcaaggggaagtcacgcgcctgtagcgccagcgtgttgtgaaatgggggcttgggggggttggggccctgactagtcaaaacaaactcccattgacgtcaatggggtggagacttggaaatccccgtgagtcaaaccgctatccacgcccattgatgtactgccaaaaccgcatcatcatggtaatagcgatgactaatacgtagatgtactgccaagtaggaaagtcccataaggtcatgtactgggcataatgccaggcgggccatttaccgtcattgacgtcaatagggggcgtacttggcatatgatacacttgatgtactgccaagtgggcagtttaccgtaaatactccacccattgacgtcaatggaaagtccctattggcgttactatgggaacatacgtcattattgacgtcaatgggcgggggtcgttgggcggtcagccaggcgggccatttaccgtaagttatgtaacgcctgcaggttaattaagaacatgtgagcaaaaggccagcaaaaggccaggaaccgtaaaaaggccgcgttgctggcgtttttccataggctccgcccccctgacgagcatcacaaaaatcgacgctcaagtcagaggtggcgaaacccgacaggactataaagataccaggcgtttccccctggaagctccctcgtgcgctctcctgttccgaccctgccgcttaccggatacctgtccgcctttctcccttcgggaagcgtggcgctttctcatagctcacgctgtaggtatctcagttcggtgtaggtcgttcgctccaagctgggctgtgtgcacgaaccccccgttcagcccgaccgctgcgccttatccggtaactatcgtcttgagtccaacccggtaagacacgacttatcgccactggcagcagccactggtaacaggattagcagagcgaggtatgtaggcggtgctacagagttcttgaagtggtggcctaactacggctacactagaagaacagtatttggtatctgcgctctgctgaagccagttaccttcggaaaaagagttggtagctcttgatccggcaaacaaaccaccgctggtagcggtggtttttttgtttgcaagcagcagattacgcgcagaaaaaaaggatctcaagaagatcctttgatcttttctacggggtctgacgctcagtggaacgaaaactcacgttaagggattttggtcatggctagttaattaacatttaaatcagcggccgcaataaaatatctttattttcattacatctgtgtgttggttttttgtgtgaatcgtaactaacatacgctctccatcaaaacaaaacgaaacaaaacaaactagcaaaataggctgtccccagtgcaagtgcaggtgccagaacatttctctatcgaa

SEQ ID NO: 208 - DNA, 4152 bp, Artificial Sequence
  Made in Lab - antibody fragment
ggatctgcgatcgctccggtgcccgtcagtgggcagagcgcacatcgcccacagtccccgagaagttggggggaggggtcggcaattgaacgggtgcctagagaaggtggcgcggggtaaactgggaaagtgatgtcgtgtactggctccgcctttttcccgagggtgggggagaaccgtatataagtgcagtagtcgccgtgaacgttctttttcgcaacgggtttgccgccagaacacagctgaagcttcgaggggctcgcatctctccttcacgcgcccgccgccctacctgaggccgccatccacgccggttgagtcgcgttctgccgcctcccgcctgtggtgcctcctgaactgcgtccgccgtctaggtaagtttaaagctcaggtcgagaccgggcctttgtccggcgctcccttggagcctacctagactcagccggctctccacgctttgcctgaccctgcttgctcaactctacgtctttgtttcgttttctgttctgcgccgttacagatccaagctgtgaccggcgcctacctgagatcaccggcgaaggagggccaccatgtacaggatgcaactcctgtcttgcattgcactaagtcttgcacttgtcacgaattcgcaagtgcagctggtgcagtctggggctgagcttgtgagacctgggacctctgtgaagttatcttgcaaagtttctggcgataccattacattttactacatgcactttgtgaagcaaaggcctggacagggtctggaatggataggaaggattgatcctgaggatgaaagtactaaatattctgagaagttcaaaaacaaggcgacactcactgcagatacatcttccaacacagcctacctgaagctcagcagcctgacctctgaggacactgcaacctatttttgtatctacggaggatactactttgattactggggcccaggaaccatggtcaccgtgtcctcagcctccaccaagggcccatcggtcttccccctggcaccctcctccaagagcacctctgggggcacagcggccctgggctgcctggtcaaggactacttccccgaaccggtgacggtgtcgtggaactcaggcgccctgaccagcggcgtgcacaccttcccggctgtcctacagtcctcaggactctactccctcagcagcgtggtgactgtgccctctagcagcttgggcacccagacctacatctgcaacgtgaatcacaagcccagcaacaccaaggtggacaagaaagttgagcccaaatcttgttgataagtgctagctggccagacatgataagatacattgatgagtttggacaaaccacaactagaatgcagtgaaaaaaatgctttatttgtgaaatttgtgatgctattgctttatttgtaaccattataagctgcaataaacaagttaacaacaacaattgcattcattttatgtttcaggttcagggggaggtgtgggaggttttttaaagcaagtaaaacctctacaaatgtggtatggaattaattctaaaatacagcatagcaaaactttaacctccaaatcaagcctctacttgaatccttttctgagggatgaataaggcataggcatcaggggctgttgccaatgtgcattagctgtttgcagcctcaccttctttcatggagtttaagatatagtgtattttcccaaggtttgaactagctcttcatttctttatgttttaaatgcactgacctcccacattccctttttagtaaaatattcagaaataatttaaatacatcattgcaatgaaaataaatgttttttattaggcagaatccagatgctcaaggcccttcataatatcccccagtttagtagttggacttagggaacaaaggaacctttaatagaaattggacagcaagaaagcgagcttctagcttatcctcagtcctgctcctctgccacaaagtgcacgcagttgccggccgggtcgcgcagggcgaactcccgcccccacggctgctcgccgatctcggtcatggccggcccggaggcgtcccggaagttcgtggacacgacctccgaccactcggcgtacagctcgtccaggccgcgcacccacacccaggccagggtgttgtccggcaccacctggtcctggaccgcgctgatgaacagggtcacgtcgtcccggaccacaccggcgaagtcgtcctccacgaagtcccgggagaacccgagccggtcggtccagaactcgaccgctccggcgacgtcgcgcgcggtgagcaccggaacggcactggtcaacttggccatgatggctcctcctgtcaggagaggaaagagaagaaggttagtacaattgctatagtgagttgtattatactatgcagatatactatgccaatgattaattgtcaaactagggctgcagggttcatagtgccacttttcctgcactgccccatctcctgcccaccctttcccaggcatagacagtcagtgacttaccaaactcacaggagggagaaggcagaagcttgagacagacccgcgggaccgccgaactgcgaggggacgtggctagggcggcttcttttatggtgcgccggccctcggaggcagggcgctcggggaggcctagcggccaatctgcggtggcaggaggcggggccgaaggccgtgcctgaccaatccggagcacataggagtctcagccccccgccccaaagcaaggggaagtcacgcgcctgtagcgccagcgtgttgtgaaatgggggcttgggggggttggggccctgactagtcaaaacaaactcccattgacgtcaatggggtggagacttggaaatccccgtgagtcaaaccgctatccacgcccattgatgtactgccaaaaccgcatcatcatggtaatagcgatgactaatacgtagatgtactgccaagtaggaaagtcccataaggtcatgtactgggcataatgccaggcgggccatttaccgtcattgacgtcaatagggggcgtacttggcatatgatacacttgatgtactgccaagtgggcagtttaccgtaaatactccacccattgacgtcaatggaaagtccctattggcgttactatgggaacatacgtcattattgacgtcaatgggcgggggtcgttgggcggtcagccaggcgggccatttaccgtaagttatgtaacgcctgcaggttaattaagaacatgtgagcaaaaggccagcaaaaggccaggaaccgtaaaaaggccgcgttgctggcgtttttccataggctccgcccccctgacgagcatcacaaaaatcgacgctcaagtcagaggtggcgaaacccgacaggactataaagataccaggcgtttccccctggaagctccctcgtgcgctctcctgttccgaccctgccgcttaccggatacctgtccgcctttctcccttcgggaagcgtggcgctttctcatagctcacgctgtaggtatctcagttcggtgtaggtcgttcgctccaagctgggctgtgtgcacgaaccccccgttcagcccgaccgctgcgccttatccggtaactatcgtcttgagtccaacccggtaagacacgacttatcgccactggcagcagccactggtaacaggattagcagagcgaggtatgtaggcggtgctacagagttcttgaagtggtggcctaactacggctacactagaagaacagtatttggtatctgcgctctgctgaagccagttaccttcggaaaaagagttggtagctcttgatccggcaaacaaaccaccgctggtagcggtggtttttttgtttgcaagcagcagattacgcgcagaaaaaaaggatctcaagaagatcctttgatcttttctacggggtctgacgctcagtggaacgaaaactcacgttaagggattttggtcatggctagttaattaacatttaaatcagcggccgcaataaaatatctttattttcattacatctgtgtgttggttttttgtgtgaatcgtaactaacatacgctctccatcaaaacaaaacgaaacaaaacaaactagcaaaataggctgtccccagtgcaagtgcaggtgccagaacatttctctatcgaa

SEQ ID NO: 209 - DNA, 681 bp, Artificial Sequence
  Made in Lab - antibody fragment
caggtacagctgcagcagtcaggtccaggactggtgaagccctcgcagaccctctcactcacctgtgccatctccggggacagtgtctctagcaacagtgctgcttggaactggatcaggcagtccccatcgagaggccttgagtggctgggaaggacatactacaggtccaagtggtataatgattatgcagtatctgtgaaaagtcgaataaccatcaacccagacacatccaagaaccagttctccctgcagctgaactctgtgactcccgaggacacggctgtgtattactgtgcaagagaagtgactggggatctcgaggatgcttttgatatctggggccaagggacaatggtcaccgtctcctcagcctccaccaagggcccatcggtcttccccctggcaccctcctccaagagcacctctgggggcacagcggccctgggctgcctggtcaaggactacttccccgaaccggtgacggtgtcgtggaactcaggcgccctgaccagcggcgtgcacaccttcccggctgtcctacagtcctcaggactctactccctcagcagcgtggtgactgtgccctctagcagcttgggcacccagacctacatctgcaacgtgaatcacaagcccagcaacaccaaggtggacaagaaagttgagcccaaatcttgt

SEQ ID NO: 210 - DNA, 642 bp, Artificial Sequence
  Made in Lab - antibody fragment
gacatccagatgacccagtctccatcgtccctgtctgcatctgtaggagacagagtcaccatcacttgccgggcaagccagaccatttggagctacttaaattggtatcagcagagaccagggaaagcccctaacctcctgatctatgctgcatccagtttgcaaagtggggtcccatcaaggttcagtggcaggggatctgggacagatttcactctcaccatcagcagtctgcaagctgaagattttgcaacttactactgtcaacagagttacagtatccctcagacttttggccaggggaccaagctggagatcaaacgaactgtggctgcaccatctgtcttcatcttcccgccatctgatgagcagttgaaatctggaactgcctctgtcgtgtgcctgctgaataacttctatcccagagaggccaaagtacagtggaaggtggataacgccctccaatcgggtaactcccaggagagtgtcacagagcaggacagcaaggacagcacctacagcctcagcagcaccctgacgctgagcaaagcagactacgagaaacacaaagtctacgcctgcgaagtcacccatcagggcctgtcctcgcccgtcacaaagagcttcaacaggggagagtgt

SEQ ID NO: 211 - DNA, 660 bp, Artificial Sequence
  Made in Lab - antibody fragment
gaggtgcaactcgttcagagcgggggcggcgtcgtcaggcctggcggctccctccgtctgccttgtgctgcctccggctttaccttcgacgattacggaatgtcctgggttcgccaggctcctggcaagggtctggagtgggtctctggcatcaactggaatggcggcagcaccggttatgctgacagtgtgaaggggaggttcacaattagccgggacaatgccaagaacagcctgtacctgcagatgaactccctgcgtgctgaggacaccgctctgtatcactgcgcgagaggcggtgacgacgcctttgacatttggggccagggtaccatggttacagtgagctctgctagcaccaagggcccgagcgtcttccctctggcccccagctctaaatctacttccgggggcaccgccgccctcgggtgcctggtgaaggactatttccctgagcctgtgacagtgagctggaactccggagcattgacttctggtgtgcacactttccccgctgtgctgcagtcctctggactgtattccctgtcctccgtggtgactgtcccaagctcctctctggggacacagacatacatctgtaatgtgaaccacaaaccgtccaacactaaggtggacaagaaagtggaaccaaagtcttgt

SEQ ID NO: 212 - DNA, 645 bp, Artificial Sequence
  Made in Lab - antibody fragment
cggatcgttatgacacagtccccgggcaccctgagcgtcagccccggagagaccgctacactctcctgcagggcctcccagtcttttagcaacatgctcgcgtggtaccaacagaagagcggacaaccacctcgcctgctcatttatggcgtttctacccgggcagctggggtgcctgcgcggttctctggctccgggtccggaactgagtttactctgacaattagcaacctccaatccgaggactttgctgtctactactgtcaacaatacggagactggccgcgctacacctttggccaagggactaaagtggaaagaaagcgtacagttgccgctcctagcgtcttcatcttccccccctctgatgagcagttgaagtccggaaccgcctccgtggtgtgtctgctgaacaacttctacccccgcgaggctaaggtgcagtggaaggtcgataacgccttgcaatctgggaactctcaggaaagcgtgacagagcaggactccaaagacagcacctatagcctgagctctactctgaccctgagcaaggctgactacgagaaacataaggtttacgcatgcgaggtgacccaccagggactgagtagtcctgtcaccaagagtttcaatcgtggcgaatgt

SEQ ID NO: 213 - DNA, 672 bp, Artificial Sequence
  Made in Lab - antibody fragment
gaagtgcaactgcagcagtccgggactgtgctggcccgtcccggagcaagcgtcaagatgagctgtaaggcgtctgggtacaggttcaccaattactggatccactgggtgaaacaaaggccaggtcagggtctggaatggattggtggcatcaacccaggaaataactataccacttacaaacgtaacctgaaaggcaaggccaccctgactgccgttacaagcgccagcactgcttatatggatctgagcagtctcacctccgaggattccgctgtgtactactgcacacgcgaaggctacggtaactatggcgcctggttcgcctactggggccagggcaccttggttaccgtgtcctctgcgtccaccaagggaccaagcgtgtttcccctcgccccaagcagcaagagcacttctggcggcactgcggctttgggctgcctggtcaaagattactttcccgagcccgttaccgtgagctggaactccggagctctgacctccggcgttcatacctttccggcggtgctgcagtcctctggcctgtattctctgtcctctgtcgtcaccgttccttcctcctccctcggaacccaaacctacatctgtaacgtgaaccacaaaccctctaacacaaaggttgacaagaaggttgagccaaaatcctgt

SEQ ID NO: 214 - DNA, 657 bp, Artificial Sequence
  Made in Lab - antibody fragment
gatgtggtcgtgacccagactccactgtctctgcctgtgagtttcggtgaccaagtcagcatttcttgcagaagttctcaatccctggctaactcttacggtaacacctttctgtcttggtatctggacaaacctggcgagagccctcagctgctgatctacggcatcagcaaccggttcagcggtgtccccgaccgcttcaccggttctggctccggcactgacttcacactgaagatctctactatcaaaccagaagacttgggcatgtactattgtttggaaggcacccaccagccatatactttcggtggcggcacaaagctggagatcaaacgcaccgtcgccgccccttccgtgttcatctttcctccttccgacgaacagctgaagagtggcacagcatctgtggtctgcctgctgaacaatttctaccctagagaggccaaggtccagtggaaggtggacaatgcactccagtccgggaactctcaggagagtgtgacagagcaggattctaaggattccacttactccctgagctctacattgactctgtccaaagccgactacgaaaagcataaggtttacgcgtgtgaagtgacccaccagggcctgtccagccctgtgaccaagagttttaaccggggggagtgc

SEQ ID NO: 215 - DNA, 672 bp, Artificial Sequence
  Made in Lab - antibody fragment
caggtgcagctgcagcagccgggcgcggaactggtgaaaccgggcgcgagcgtgaaaatgagctgcaaagcgagcggctatacctttaccagctataacatgcattgggtgaaacagaccccgggccgcggcctggaatggattggcgcgatttatccgggcaacggcgataccagctataaccagaaatttaaaggcaaagcgaccctgaccgcggataaaagcagcagcaccgcgtatatgcagctgagcagcctgaccagcgaagatagcgcggtgtattattgcgcgcgcagcacctattatggcggcgattggtattttaacgtgtggggcgcgggcaccaccgtgaccgtgagcgcggcgagcaccaagggcccatcggtcttccccctggcaccctcctccaagagcacctctgggggcacagcggccctgggctgcctggtcaaggactacttccccgaaccggtgacggtgtcgtggaactcaggcgccctgaccagcggcgtgcacaccttcccggctgtcctacagtcctcaggactctactccctcagcagcgtggtgactgtgccctctagcagcttgggcacccagacctacatctgcaacgtgaatcacaagcccagcaacaccaaggtggacaagaaagttgagcccaaatcttgt

SEQ ID NO: 216 - DNA, 639 bp, Artificial Sequence
  Made in Lab - antibody fragment
cagattgtgctgagccagagcccggcgattctgagcgcgagcccgggcgaaaaagtgaccatgacctgccgcgcgagcagcagcgtgagctatattcattggtttcagcagaaaccgggcagcagcccgaaaccgtggatttatgcgaccagcaacctggcgagcggcgtgccggtgcgctttagcggcagcggcagcggcaccagctatagcctgaccattagccgcgtggaagcggaagatgcggcgacctattattgccagcagtggaccagcaacccgccgacctttggcggcggcaccaagcttgagatcaaacgaactgtggctgcaccatctgtcttcatcttcccgccatctgatgagcagttgaaatctggaactgcctctgtcgtgtgcctgctgaataacttctatcccagagaggccaaagtacagtggaaggtggataacgccctccaatcgggtaactcccaggagagtgtcacagagcaggacagcaaggacagcacctacagcctcagcagcaccctgacgctgagcaaagcagactacgagaaacacaaagtctacgcctgcgaagtcacccatcagggcctgtcctcgcccgtcacaaagagcttcaacaggggagagtgt

SEQ ID NO: 217 - DNA, 666 bp, Artificial Sequence
  Made in Lab - antibody fragment
caagtgcagctcgtgcagagtggcgcagaggtgaagaaacctggctcaagtgttaaggtgtcctgtaaggctagtggctacgctttttcttacagttggatcaactgggttcgccaagcccccgggcagggattggaatggatgggcaggatctttccaggcgatggagacactgactataacggcaagtttaagggcagggtgacaatcacggcggacaaaagcacaagcactgcctacatggagctgagctcactgcggtcagaggacacggctgtatattactgcgccaggaacgtgttcgatggctactggctggtgtattgggggcagggcacgcttgtgactgttagcagcgcaagtactaagggtccatcagtgttcccactggctccatcctctaagtcaacgtctggcggtacagcagctcttggctgtctcgttaaggactattttccggagcctgtgaccgtcagttggaattctggcgcactgacgtcaggagtgcatacttttcctgccgtcctgcagagttccggactgtacagcctttcctccgtcgtgactgttccatccagcagcctgggaacccagacctatatttgtaacgtgaaccacaagccctcaaacaccaaggttgacaagaaggtggagcctaagagttgt

SEQ ID NO: 218 - DNA, 666 bp, Artificial Sequence
  Made in Lab - antibody fragment
gatatagtaatgacacaaacgcctctgtctcttcctgtcacgcccggcgaaccagcctccatatcctgcagatcatctaaaagtcttctccactccaacggaattacgtatttgtactggtatttgcagaagcctgggcagtctccccaactgctgatttatcagatgtctaacttggtaagcggggtgcccgataggttttcagggtccggaagcggcacagatttcacgctgaagatcagcagagtggaagccgaggacgtgggcgtgtattattgcgcgcagaatttggagctcccatataccttcggaggtgggaccaaggtagaaatcaagcgaactgtcaggactgtcgctgccccgagcgttttcatcttccccccgtctgacgaacagcttaaaagcggcactgcaagcgtggtgtgcctgcttaacaatttctatcccagagaagcgaaggttcagtggaaggtggataacgccctgcaatctggcaatagccaggagtccgttacagaacaagattcaaaagactcaacgtactctctgtcctccacactgaccctgagcaaagctgattacgaaaaacataaggtttacgcctgcgaggtcacacaccaggggctttctagtccggtgactaaatcttttaaccgcggggaatgt

SEQ ID NO: 219 - DNA, 675 bp, Artificial Sequence
  Made in Lab - antibody fragment
gaggtgcagctggtcgagtcaggcggaggcctggttcagccagggagatccctcaggctttcctgcgccgcctccggttttaccttcaacgactacgctatgcactgggttcgccaggctcccggaaagggacttgaatgggtgagcactatcagctggaattctggaagcattgggtatgccgactccgtcaagggccgctttactatttctcgggataatgcgaagaagtctctgtacctgcagatgaacagtcttcgggcagaagacacggctctttactattgcgcaaaagacatccagtacggaaactattattacggaatggatgtgtggggtcagggcaccactgtgacagtaagcagtgctagtacaaagggaccttctgtgtttccacttgctcctagctccaaatccacgtccgggggcactgccgctctgggctgcctcgttaaagattacttcccagagcctgtcactgtgtcctggaattccggcgcccttacgtcaggggtacacacatttcccgcggtactccagtcaagcggcttgtacagcctgtcctccgtagtgacagtgccttcctcttctctcggcactcaaacttacatctgcaatgtcaatcacaaaccgagtaacactaaggttgacaagaaagttgaacctaagagctgt

SEQ ID NO: 220 - DNA, 642 bp, Artificial Sequence
  Made in Lab - antibody fragment
gaaatcgtcctgacgcagtcacctgcaaccctgagtctcagccctggtgagcgggccaccctgagctgcagggccagccagagtgtatcttcttacctggcttggtatcagcagaaaccaggacaggccccaagactgctgatctacgacgcttccaatagagccacgggcatccctgcccgattttccggatcagggtccggtacagatttcacgctgaccatcagctccctcgagcccgaagattttgctgtgtattattgccagcagcggtccaattggcccattaccttcggtcaggggaccaggctggagattaaacggaccgtggctgctccctcagttttcatctttcccccatctgatgagcagctgaagtccgggaccgcaagcgtcgtgtgcctccttaacaatttttacccacgagaagctaaggttcagtggaaggtggataatgctctccagtccggtaattctcaggaatcagtgaccgaacaggatagcaaagattctacctatagcttgtcatcaactctgaccctctccaaagccgactacgagaaacacaaagtctacgcatgcgaggtgactcaccaaggtctgagttcacccgttactaaaagctttaacagaggagaatgt

SEQ ID NO: 221 - DNA, 672 bp, Artificial Sequence
  Made in Lab - antibody fragment
gaagttcagctggttgaatctggtggtggtctggttcagccgggtggttctctgcgtctgtcttgcgctgcttctggtttcaccttctctaacttcgacatggcttgggttcgtcaggctccgggtaaaggtctggtttgggtttcttctatcaccaccggtggtggtgacacctactacgctgactctgttaaaggtcgtttcaccatctctcgtgacaacgctaaatctaccctgtacctgcagatggactctctgcgttctgaagacaccgctgtttactactgcgttcgtcacggttactacgacggttaccacctgttcgactactggggtcagggtaccctggttaccgtttcttctgcctccaccaagggcccatcggtcttccccctggcaccctcctccaagagcacctctgggggcacagcggccctgggctgcctggtcaaggactacttccccgaaccggtgacggtgtcgtggaactcaggcgccctgaccagcggcgtgcacaccttcccggctgtcctacagtcctcaggactctactccctcagcagcgtggtgactgtgccctctagcagcttgggcacccagacctacatctgcaacgtgaatcacaagcccagcaacaccaaggtggacaagaaagttgagcccaaatcttgt

SEQ ID NO: 222 - DNA, 642 bp, Artificial Sequence
  Made in Lab - antibody fragment
gacatccagatgacccagtctccgtcttctctgtctgcttctgttggtgaccgtgttaccatcacctgccgtgctaaccagggtatctctaacaacctgaactggtaccagcagaaaccgggtaaagctccgaaaccgctgatctactacacctctaacctgcagtctggtgttccgtctcgtttctctggttctggttctggtaccgactacaccctgaccatctcttctctgcagccggaagacttcgctacctactactgccagcagttcacctctctgccgtacaccttcggtcagggtaccaaactggaaatcaaacgaactgtggctgcaccatctgtcttcatcttcccgccatctgatgagcagttgaaatctggaactgcctctgtcgtgtgcctgctgaataacttctatcccagagaggccaaagtacagtggaaggtggataacgccctccaatcgggtaactcccaggagagtgtcacagagcaggacagcaaagacagcacctacagcctcagcagcaccctgacgctgagcaaagcagactacgagaaacacaaagtctacgcctgcgaagtcacccatcagggcctgtcctcgcccgtcacaaagagcttcaacaggggagagtgt

SEQ ID NO: 223 - DNA, 633 bp, Artificial Sequence
  Made in Lab - antibody fragment
gagattgtcctgacccagtcccctgctattatgtctgcttcccccggcgaaagagtgaccatgacctgtagtgcctccagcggcgtcaactacatgcactggtatcagcagaagccagggacctctccccggagatggatctacgacacatcaaagctggccagcggagtgcctgcacggttctccggatctggcagtgggactgactatagcctgaccatcagcagcatggagccagaagatgccgctacctactattgccatcagaggggctcctacacatttggcgggggaactaagctggagatcaaacgcacagtggcagcccccagcgtcttcatttttcccccttccgatgaacagctgaagtccggcactgcttctgtggtctgtctgctgaacaatttctatcccagagaggccaaggtgcagtggaaagtggacaacgctctgcagtccggcaacagccaggagagtgtgaccgaacaggatagtaaggacagcacatattctctgtctagtaccctgacactgagtaaggcagattacgagaagcacaaagtgtatgcctgcgaagtcactcatcagggactgtcaagccccgtgaccaagagcttcaaccggggcgagtgt

SEQ ID NO: 224 - DNA, 669 bp, Artificial Sequence
  Made in Lab - antibody fragment
caggtgcagctggtccagccaggggcagaggtcgtcaagccaggagcatccgtcaaactgtcatgtaaaacaagcgggtatactttcaccagcaattggatgcactgggtgaagcaggcccccggacagggcctggagtggatcggggaaattgaccctagtgattcatacactaactacaaccagaacttccagggaaaggccaaactgaccgtggacaaaagcacctccacagcttatatggaggtgagcagcctgcggtccgacgatactgcagtctactattgcgccagaggctctaacccttactattacgctatggattactgggggcagggaacaagcgtgactgtctctagtgcatcaacaaagggaccaagcgtgtttccactggccccctcaagcaagagcacctccggagggacagccgctctgggatgtctggtgaaagactacttccccgagcctgtgactgtctcttggaatagtggcgctctgacctccggggtgcacacatttccagcagtcctgcagtcctctggactgtattctctgagttcagtggtcaccgtgcccagctcctctctgggcactcagacctacatctgcaatgtcaaccataagcctagtaacacaaaagtggataagaaagtcgaaccaaagagctgt

SEQ ID NO: 225 - DNA, 672 bp, Artificial Sequence
  Made in Lab - antibody fragment
caggtccaactgcaggagtcaggaggaggcttggtacagcctgggggttctctgagactctcctgtgcaacttctgggttcaccttcactgattactacatgaactgggtccgccagcctccaggaaaggcacttgagtggttgggttttattggaaacaaagctaatggttacacaacagagtacagtgcatctgtgaagggtcggttcaccatctccagagataaatcccaaagcatcctctatcttcaaatgaacaccctgagagctgaggacagtgccacttattactgtaccagagatagggggctacggttctactttgactactggggccaagggaccacggtcaccgtctcctcagcctccaccaagggcccatcggtcttccccctggcaccctcctccaagagcacctctgggggcacagcggccctgggctgcctggtcaaggactacttccccgaaccggtgacggtgtcgtggaactcaggcgccctgaccagcggcgtgcacaccttcccggctgtcctacagtcctcaggactctactccctcagcagcgtggtgactgtgccctctagcagcttgggcacccagacctacatctgcaacgtgaatcacaagcccagcaacaccaaggtggacaagaaagttgagcccaaatcttgt

SEQ ID NO: 226 - DNA, 642 bp, Artificial Sequence
  Made in Lab - antibody fragment
gacattgagctcacccagtctccagcaatcctgtctgcatctccaggggagaaggtcacaatgacttgcagggccagctcaagtgtaacttacattcactggtaccagcagaagccaggatcctcccccaaatcctggatttatgccacatccaacctggcttctggagtccctgctcgcttcagtggcagtgggtctgggacctcttactctctcacaatcagcagagtggaggctgaagatgctgccacttattactgccaacattggagtagtaaaccaccgacgttcggtggagggaccaagctcgagatcaaaaaacgaactgtggctgcaccatctgtcttcatcttcccgccatctgatgagcagttgaaatctggaactgcctctgtcgtgtgcctgctgaataacttctatcccagagaggccaaagtacagtggaaggtggataacgccctccaatcgggtaactcccaggagagtgtcacagagcaggacagcaaggacagcacctacagcctcagcagcaccctgacgctgagcaaagcagactacgagaaacacaaagtctacgcctgcgaagtcacccatcagggcctgtcctcgcccgtcacaaagagcttcaacaggggagagtgt

SEQ ID NO: 227-232 - skipped (6 entries)

SEQ ID NO: 233 - DNA, 660 bp, Artificial Sequence
  Made in Lab - antibody fragment
gacatccagctgacccagtccccctcctccctgtccgcctccgtgggcgaccgggtgaccatgagctgcaagtcctcccagtccgtgctgtactccgccaaccacaagaactacctggcctggtaccagcagaagcccggcaaggcccccaagctgctgatctactgggccagcacccgcgagagcggcgtgccctcccggttctccggctccggctccggcaccgacttcaccttcaccatctcctccctgcagcccgaggacatcgccacctactactgccaccagtacctgtcctcctggaccttcggcggcggcaccaagctggagatcaagcgcacggtggccgcccccagtgtcttcattttccccccttccgatgagcagctgaagagcggtacagcctctgttgtttgtctgctgaacaacttctatccacgcgaggccaaggtgcagtggaaagttgataacgcgctgcagagtggcaactcccaggagtctgtgacagagcaggacagtaaagacagcacatattccctgtctagcacactgactctgtccaaggctgactatgagaagcacaaggtgtacgcttgcgaggtcacccaccagggactgagttctcctgtgaccaagtccttcaatcgcggcgagtgttaa

SEQ ID NO: 234 - DNA, 660 bp, Artificial Sequence
  Made in Lab - antibody fragment
caggtgcagctggtgcagtccggcgccgaggtgaagaagcccggctcctccgtgaaggtgtcctgcaaggcctccggctacaccttcacctcctactggctgcactgggtgcggcaggcccccggccagggcctggagtggatcggctacatcaacccccggaacgactacaccgagtacaaccagaacttcaaggacaaggccaccatcaccgccgacgagtccaccaacaccgcctacatggagctgtcctccctgcggtccgaggacaccgccttctacttctgcgcccggcgggacatcaccaccttctactggggccagggcaccactgtgaccgtgtcctccgccaggaccaaaggaccgtccgtctttcctctggccccttcctctaagtccacaagcggtgggaccgcagcactgggatgcctggtgaaggattacttccctgagccggtgaccgtgtcctggaactccggagctctcacctccggtgtccatacctttcctgccgtcctgcagtcctccggcctgtacagcctctctagcgtcgtgactgtgccctccagctccctgggcacccaaacttatatctgcaatgttaaccacaagccttctaataccaaggtcgacaagaaagtggagccgaagagctgttaa

SEQ ID NO: 235 - DNA, 1338 bp, Artificial Sequence
  Made in Lab - antibody fragment
caggtgcagctggtgcagtccggcgccgaggtgaagaagcccggctcctccgtgaaggtgtcctgcaaggcctccggctacaccttcacctcctactggctgcactgggtgcggcaggcccccggccagggcctggagtggatcggctacatcaacccccggaacgactacaccgagtacaaccagaacttcaaggacaaggccaccatcaccgccgacgagtccaccaacaccgcctacatggagctgtcctccctgcggtccgaggacaccgccttctacttctgcgcccggcgggacatcaccaccttctactggggccagggcaccactgtgaccgtgtcctccgccaggaccaaaggaccgtccgtctttcctctggccccttcctctaagtccacaagcggtgggaccgcagcactgggatgcctggtgaaggattacttccctgagccggtgaccgtgtcctggaactccggagctctcacctccggtgtccatacctttcctgccgtcctgcagtcctccggcctgtacagcctctctagcgtcgtgactgtgccctccagctccctgggcacccaaacttatatctgcaatgttaaccacaagccttctaataccaaggtcgacaagaaagtggagccgaagagctgtgacaaaactcacacatgcccaccgtgcccagcacctccagtcgccggaccgtcagtcttcctcttccctccaaaacccaaggacaccctcatgatctcccggacccctgaggtcacatgcgtggtggtggacgtgagccacgaagaccctgaggtcaagttcaactggtacgtggacggcgtggaggtgcataatgccaagacaaagccgcgggaggagcagtacaacagcacgtaccgtgtggtcagcgtcctcaccgtcctgcaccaggactggctgaatggcaaggagtacaagtgcaaggtctccaacaaaggcctcccaagctccatcgagaaaaccatctccaaagccaaagggcagccccgagaaccacaggtgtacaccctgcctccatcccgggatgagctgaccaagaaccaggtcagcctgacctgcctggtcaaaggcttctatcccagcgacatcgccgtggagtgggagagcaatgggcagccggagaacaactacaagaccacgcctcccgtgctggactccgacggctccttcttcctctacagcaagctcaccgtggacaagagcaggtggcagcaggggaacgtcttctcatgctccgtgatgcatgaggctctgcacaaccactacacgcagaagagcctctccctgtctccgggtaaataa

SEQ ID NO: 236 - DNA, 1362 bp, Artificial Sequence
  Made in Lab - antibody fragment
caggtacagctgcagcagtcaggtccaggactggtgaagccctcgcagaccctctcactcacctgtgccatctccggggacagtgtctctagcaacagtgctgcttggaactggatcaggcagtccccatcgagaggccttgagtggctgggaaggacatactacaggtccaagtggtataatgattatgcagtatctgtgaaaagtcgaataaccatcaacccagacacatccaagaaccagttctccctgcagctgaactctgtgactcccgaggacacggctgtgtattactgtgcaagagaagtgactggggatctcgaggatgcttttgatatctggggccaagggacaatggtcaccgtctcctcagcctccaccaagggcccatcggtcttccccctggcaccctcctccaagagcacctctgggggcacagcggccctgggctgcctggtcaaggactacttccccgaaccggtgacggtgtcgtggaactcaggcgccctgaccagcggcgtgcacaccttcccggctgtcctacagtcctcaggactctactccctcagcagcgtggtgactgtgccctctagcagcttgggcacccagacctacatctgcaacgtgaatcacaagcccagcaacaccaaggtggacaagaaagttgagcccaaatcttgtgacaaaactcacacatgcccaccgtgcccagcacctccagtcgccggaccgtcagtcttcctcttccctccaaaacccaaggacaccctcatgatctcccggacccctgaggtcacatgcgtggtggtggacgtgagccacgaagaccctgaggtcaagttcaactggtacgtggacggcgtggaggtgcataatgccaagacaaagccgcgggaggagcagtacaacagcacgtaccgtgtggtcagcgtcctcaccgtcctgcaccaggactggctgaatggcaaggagtacaagtgcaaggtctccaacaaaggcctcccaagctccatcgagaaaaccatctccaaagccaaagggcagccccgagaaccacaggtgtacaccctgcctccatcccgggatgagctgaccaagaaccaggtcagcctgacctgcctggtcaaaggcttctatcccagcgacatcgccgtggagtgggagagcaatgggcagccggagaacaactacaagaccacgcctcccgtgctggactccgacggctccttcttcctctacagcaagctcaccgtggacaagagcaggtggcagcaggggaacgtcttctcatgctccgtgatgcatgaggctctgcacaaccactacacgcagaagagcctctccctgtctccgggtaaataa

SEQ ID NO: 237 - protein, 218 aa, Artificial Sequence
  Made in Lab - antibody fragment
DIQLTQSPSTLSASVGDRVTITCRASESLDNYGIRFLTWFQQKPGKAPKLLMYAASNQGSGVPSRFSGSGSGTEFTLTISSLQPDDFATYYCQQTKEVPWSFGQGTKVEVKRTVAAPSVFIFPPSDEQLKSGTASVVCLLNNFYPREAKVQWKVDNALQSGNSQESVTEQDSKDSTYSLSSTLTLSKADYEKHKVYACEVTHQGLSSPVTKSFNRGEC

SEQ ID NO: 238 - protein, 224 aa, Artificial Sequence
  Made in Lab - antibody fragment
EVQLVQSGAEVKKPGSSVKVSCKASGYTITDSNIHWVRQAPGQSLEWIGYIYPYNGGTDYNQKFKNRATLTVDNPTNTAYMELSSLRSEDTAFYYCVNGNPWLAYWGQGTLVTVSSASTKGPSVFPLAPSSKSTSGGTAALGCLVKDYFPEPVTVSWNSGALTSGVHTFPAVLQSSGLYSLSSVVTVPSSSLGTQTYICNVNHKPSNTKVDKKVEPKSCDKTHT

SEQ ID NO: 239 - protein, 217 aa, Artificial Sequence
  Made in Lab - antibody fragment
DIVLTQSPASLAVSLGQRATISCRASESVDNYGNTFMHWYQQKPGQPPKLLIYRASNLESGIPARFSGSGSRTDFTLTINPVEADDVATYYCQQSNEDPPTFGAGTKLELRTVAAPSVFIFPPSDEQLKSGTASVVCLLNNFYPREAKVQWKVDNALQSGNSQESVTEQDSKDSTYSLSSTLTLSKADYEKHKVYACEVTHQGLSSPVTKSFNRGEC

SEQ ID NO: 240 - protein, 221 aa, Artificial Sequence
  Made in Lab - antibody fragment
QIQLVQSGPELKKPGETVKISCKASGYIFTNYGMNWVKQAPGKSFKWMGWINTYTGESTYSADFKGRFAFSLETSASTAYLHINDLKNEDTATYFCARSGGYDPMDYWGQGTSVTVSSARTKGPSVFPLAPSSKSTSGGTAALGCLVKDYFPEPVTVSWNSGALTSGVHTFPAVLQSSGLYSLSSVVTVPSSSLGTQTYICNVNHKPSNTKVDKKVEPKSC

SEQ ID NO: 241 - protein, 213 aa, Artificial Sequence
  Made in Lab - antibody fragment
DVQITQSPSYLAASPGETITINCRASKSISKDLAWYQEKPGKTNKLLIYSGSTLQSGIPSRFSGSGSGTDFTLTISSLEPEDFAMYYCQQHNKYPYTFGGGTKLEIRTVAAPSVFIFPPSDEQLKSGTASVVCLLNNFYPREAKVQWKVDNALQSGNSQESVTEQDSKDSTYSLSSTLTLSKADYEKHKVYACEVTHQGLSSPVTKSFNRGEC

SEQ ID NO: 242 - protein, 218 aa, Artificial Sequence
  Made in Lab - antibody fragment
QVQLQQPGAELVRPGASVKLSCKASGYTFTSYWMNWVKQRPDQGLEWIGRIDPYDSETHYNQKFKDKAILTVDKSSSTAYMQLSSLTSEDSAVYYCARGNWDDYWGQGTTLTVSSARTKGPSVFPLAPSSKSTSGGTAALGCLVKDYFPEPVTVSWNSGALTSGVHTFPAVLQSSGLYSLSSVVTVPSSSLGTQTYICNVNHKPSNTKVDKKVEPKSC

SEQ ID NO: 243 - protein, 107 aa, Artificial Sequence; identical to SEQ ID NO: 197
  Made in Lab - antibody fragment

SEQ ID NO: 244 - protein, 222 aa, Artificial Sequence; identical to SEQ ID NO: 198
  Made in Lab - antibody fragment

SEQ ID NO: 245 - protein, 13 aa, Artificial Sequence
  Made in Lab - antibody fragment
NYHLENEVARLKK

SEQ ID NO: 246 - protein, 20 aa, Artificial Sequence
  Made in Lab - antibody fragment
METDTLLLWVLLLWVPGSTG

SEQ ID NO: 247 - protein, 107 aa, Artificial Sequence; identical to SEQ ID NO: 197
  Made in Lab - antibody fragment

SEQ ID NO: 248 - protein, 119 aa, Artificial Sequence
  Made in Lab - antibody fragment
EVQLVESGGGLVQPGGSLRLSCAASGFDFSRYWMSWVRQAPGKGLEWIGEINPDSSTINYAPSLKDKFIISRDNAKNSLYLQMNSLRAEDTAVYYCARPDGNYWYFDVWGQGTLVTVSS

SEQ ID NO: 249 - protein, 107 aa, Artificial Sequence
  Made in Lab - antibody fragment
DIQMTQSPSSLSASVGDRVTITCRASQDVNTAVAWYQQKPGKAPKLLIYSASFLYSGVPSRFSGSRSGTDFTLTISSLQPEDFATYYCQQHYTTPPTFGQGTKLEIK

SEQ ID NO: 250 - protein, 114 aa, Artificial Sequence
  Made in Lab - antibody fragment
QLQESGPGLVKPSQTLSLTCTVSGYSISSDFAWNWIRQPPGKGLEWMGYISYSGNTRYQPSLKSRITISRDTSKNQFFLKLNSVTAADTATYYCVTAGRGFPYWGQGTLVTVSS

SEQ ID NO: 251 - protein, 107 aa, Artificial Sequence
  Made in Lab - antibody fragment
DIQMTQSPSSLSASVGDRVTITCRANQGISNNLNWYQQKPGKAPKPLIYYTSNLQSGVPSRFSGSGSGTDYTLTISSLQPEDFATYYCQQFTSLPYTFGQGTKLEIK

SEQ ID NO: 252 - protein, 121 aa, Artificial Sequence
  Made in Lab - antibody fragment
EVQLVESGGGLVQPGGSLRLSCAASGFTFSNFDMAWVRQAPGKGLVWVSSITTGGGDTYYADSVKGRFTISRDNAKSTLYLQMDSLRSEDTAVYYCVRHGYYDGYHLFDYWGQGTLVTVSS

SEQ ID NO: 253 - protein, 107 aa, Artificial Sequence; identical to SEQ ID NO: 25
  Made in Lab - antibody fragment

SEQ ID NO: 254 - protein, 120 aa, Artificial Sequence; identical to SEQ ID NO: 15
  Made in Lab - antibody fragment

SEQ ID NO: 255 - protein, 108 aa, Artificial Sequence
  Made in Lab - antibody fragment
ENVLTQSPAIMSASPGEKVTMTCRASSNVISSYVHWYQQRSGASPKLWIYSTSNLASGVPARFSGSGSGTSYSLTISSVEAEDAATYYCQQYSGYPLTFGAGTKLELK

SEQ ID NO: 256 - protein, 123 aa, Artificial Sequence
  Made in Lab - antibody fragment
DIQLQESGPGLVKPSQSLSLTCSVTGYSITSAYYWNWIRQFPGNKLEWMGYISYDGRNNYNPSLKNRISITRDTSKNQFFLKLNSVTTEDTATYYCAKEGDYDVGNYYAMDYWGQGTSVTVSS

SEQ ID NO: 257 - protein, 111 aa, Artificial Sequence [sequence omitted]

SEQ ID NO: 258 - protein, 116 aa, Artificial Sequence [sequence omitted]

SEQ ID NO: 259 - protein, 111 aa, Artificial Sequence
  Made in Lab - antibody fragment
DIQMTQSPSSLSASVGDRVTITCRASESVDNYGISFMNWFQQKPGKAPKLLIYAASNQGSGVPSRFSGSGSGTDFTLNISSLQPDDFATYYCQQSKEVPWTFGQGTKVEIK

SEQ ID NO: 260 - protein, 116 aa, Artificial Sequence
  Made in Lab - antibody fragment
QVQLVQSGAEVKKPGSSVKVSCKASGYTFTDYNMHWVRQAPGQGLEWIGYIYPYNGGTGYNQKFKSKATITADESTNTAYMELSSLRSEDTAVYYCARGRPAMDYWGQGTLVTVSS

SEQ ID NO: 261 - protein, 111 aa, Artificial Sequence
  Made in Lab - antibody fragment
DIVLTQSPASLAVSLGQRATISCRASESVDNYGNTFMHWYQQKPGQPPKLLIYRASNLESGIPARFSGSGSRTDFTLTINPVEADDVATYYCQQSNEDPPTFGAGTKLELK

SEQ ID NO: 262 - protein, 118 aa, Artificial Sequence
  Made in Lab - antibody fragment
QIQLVQSGPELKKPGETVKISCKASGYIFTNYGMNWVKQAPGKSFKWMGWINTYTGESTYSADFKGRFAFSLETSASTAYLHINDLKNEDTATYFCARSGGYDPMDYWGQGTSVTVSS

SEQ ID NO: 263 - protein, 107 aa, Artificial Sequence
  Made in Lab - antibody fragment
DVQITQSPSYLAASPGETITINCRASKSISKDLAWYQEKPGKTNKLLIYSGSTLQSGIPSRFSGSGSGTDFTLTISSLEPEDFAMYYCQQHNKYPYTFGGGTKLEIK

SEQ ID NO: 264 - protein, 115 aa, Artificial Sequence
  Made in Lab - antibody fragment
QVQLQQPGAELVRPGASVKLSCKASGYTFTSYWMNWVKQRPDQGLEWIGRIDPYDSETHYNQKFKDKAILTVDKSSSTAYMQLSSLTSEDSAVYYCARGNWDDYWGQGTTLTVSS

SEQ ID NO: 265 - protein, 107 aa, Artificial Sequence
  Made in Lab - antibody fragment
DIQMTQSPSSLSASVGDRVTITCRASQTIWSYLNWYQQRPGKAPNLLIYAASSLQSGVPSRFSGRGSGTDFTLTISSLQAEDFATYYCQQSYSIPQTFGQGTKLEIK

SEQ ID NO: 266 - protein, 124 aa, Artificial Sequence
  Made in Lab - antibody fragment
QVQLQQSGPGLVKPSQTLSLTCAISGDSVSSNSAAWNWIRQSPSRGLEWLGRTYYRSKWYNDYAVSVKSRITINPDTSKNQFSLQLNSVTPEDTAVYYCAREVTGDLEDAFDIWGQGTMVTVSS

SEQ ID NO: 267 - protein, 112 aa, Artificial Sequence [sequence omitted]

SEQ ID NO: 268 - protein, 116 aa, Artificial Sequence [sequence omitted]

SEQ ID NO: 269 - protein, 15 aa, Artificial Sequence
  Motif of GNC4 peptide derivatives
  MOD_RES (1)..(1): Any amino acid or absent
  MOD_RES (14)..(15): Any amino acid or absent
XNYHLENEVARLKXX

SEQ ID NO: 270 - protein, 475 aa, Artificial Sequence
  Made in Lab - CAR construct
MGVPTQLLGLLLLWITDAICDIQMTQSPASLSTSLGETVTIQCQASEDIYSGLAWYQQKPGKSPQLLIYGASDLQDGVPSRFSGSGSGTQYSLKITSMQTEDEGVYFCQQGLTYPRTFGGGTKLELKGGGGSGGGGSGGGGSEVQLQQSGAELVRPGTSVKLSCKVSGDTITFYYMHFVKQRPGQGLEWIGRIDPEDESTKYSEKFKNKATLTADTSSNTAYLKLSSLTSEDTATYFCIYGGYYFDYWGQGVMVTVSSIEFMYPPPYLDNERSNGTIIHIKEKHLCHTQSSPKLFWALVVVAGVLFCYGLLVTVALCVIWTNSRRNRGGQSDYMNMTPRRPGLTRKPYQPYAPARDFAAYRPRAKFSRSAETAANLQDPNQLFNELNLGRREEFDVLEKKRARDPEMGGKQQRRRNPQEGVYNALQKDKMAEAYSEIGTKGERRRGKGHDGLFQGLSTATKDTFDALHMQTLAPR

SEQ ID NO: 271 - protein, 460 aa, Artificial Sequence
  Made in Lab - CAR construct
DAVVTQESALTSSPGETVTLTCRSSTGAVTTSNYASWVQEKPDHLFTGLIGGTNNRAPGVPARFSGSLIGDKAALTITGAQTEDEAIYFCVLWYSDHWVFGGGTKLTVLGGGGGSGGGGSGGGGSGGGGSDVQLQESGPGLVAPSQSLSITCTVSGFLLTDYGVNWVRQSPGKGLEWLGVIWGDGITDYNSALKSRLSVTKDNSKSQVFLKMNSLQSGDSARYYCVTGLFDYWGQGTTLTVSSIEFMYPPPYLDNERSNGTIIHIKEKHLCHTQSSPKLFWALVVVAGVLFCYGLLVTVALCVIWTNSRRNRGGQSDYMNMTPRRPGLTRKPYQPYAPARDFAAYRPRAKFSRSAETAANLQDPNQLFNELNLGRREEFDVLEKKRARDPEMGGKQQRRRNPQEGVYNALQKDKMAEAYSEIGTKGERRRGKGHDGLFQGLSTATKDTFDALHMQTLAPR

SEQ ID NO: 272 - protein, 436 aa, Artificial Sequence
  Made in Lab - CAR construct
DAVVTQESALTSSPGETVTLTCRSSTGAVTTSNYASWVQEKPDHLFTGLIGGTNNRAPGVPARFSGSLIGDKAALTITGAQTEDEAIYFCVLWYSDHWVFGGGTKLTVLGGGGGSGGGGSGGGGSGGGGSDVQLQESGPGLVAPSQSLSITCTVSGFLLTDYGVNWVRQSPGKGLEWLGVIWGDGITDYNSALKSRLSVTKDNSKSQVFLKMNSLQSGDSARYYCVTGLFDYWGQGTTLTVSSESKYGPPCPPCPFWALVVVAGVLFCYGLLVTVALCVIWTNSRRNRGGQSDYMNMTPRRPGLTRKPYQPYAPARDFAAYRPRAKFSRSAETAANLQDPNQLFNELNLGRREEFDVLEKKRARDPEMGGKQQRRRNPQEGVYNALQKDKMAEAYSEIGTKGERRRGKGHDGLFQGLSTATKDTFDALHMQTLAPR

SEQ ID NO: 273 - protein, 440 aa, Artificial Sequence
  Made in Lab - CAR construct
DAVVTQESALTSSPGETVTLTCRSSTGAVTTSNYASWVQEKPDHLFTGLIGGTNNRAPGVPARFSGSLIGDKAALTITGAQTEDEAIYFCVLWYSDHWVFGGGTKLTVLGGGGGSGGGGSGGGGSGGGGSDVQLQESGPGLVAPSQSLSITCTVSGFLLTDYGVNWVRQSPGKGLEWLGVIWGDGITDYNSALKSRLSVTKDNSKSQVFLKMNSLQSGDSARYYCVTGLFDYWGQGTTLTVSSESKYGPPCPPCPFWALVVVAGVLFCYGLLVTVALCVIWTKWIRKKFPHIFKQPFKKTTGAAQEEDACSCRCPQEEEGGGGGYELRAKFSRSAETAANLQDPNQLFNELNLGRREEFDVLEKKRARDPEMGGKQQRRRNPQEGVYNALQKDKMAEAYSEIGTKGERRRGKGHDGLFQGLSTATKDTFDALHMQTLAPR

SEQ ID NO: 274 - protein, 481 aa, Artificial Sequence
  Made in Lab - CAR construct
DAVVTQESALTSSPGETVTLTCRSSTGAVTTSNYASWVQEKPDHLFTGLIGGTNNRAPGVPARFSGSLIGDKAALTITGAQTEDEAIYFCVLWYSDHWVFGGGTKLTVLGGGGGSGGGGSGGGGSGGGGSDVQLQESGPGLVAPSQSLSITCTVSGFLLTDYGVNWVRQSPGKGLEWLGVIWGDGITDYNSALKSRLSVTKDNSKSQVFLKMNSLQSGDSARYYCVTGLFDYWGQGTTLTVSSESKYGPPCPPCPFWALVVVAGVLFCYGLLVTVALCVIWTNSRRNRGGQSDYMNMTPRRPGLTRKPYQPYAPARDFAAYRPKWIRKKFPHIFKQPFKKTTGAAQEEDACSCRCPQEEEGGGGGYELRAKFSRSAETAANLQDPNQLFNELNLGRREEFDVLEKKRARDPEMGGKQQRRRNPQEGVYNALQKDKMAEAYSEIGTKGERRRGKGHDGLFQGLSTATKDTFDALHMQTLAPR

SEQ ID NO: 275 - protein, 436 aa, Artificial Sequence
  Made in Lab - CAR construct
DAVVTQESALTSSPGETVTLTCRSSTGAVTTSNYASWVQEKPDHLFTGLIGGTNNRAPGVPARFSGSLIGDKAALTITGAQTEDEAIYFCVLWYSDHWVFGGGTKLTVLGGGGGSGGGGSGGGGSGGGGSDVQLQESGPGLVAPSQSLSITCTVSGFLLTDYGVNWVRQSPGKGLEWLGVIWGDGITDYNSALKSRLSVTKDNSKSQVFLKMNSLQSGDSARYYCVTGLFDYWGQGTTLTVSSESKYGPPCPPCPFWALVVVAGVLFCYGLLVTVALCVIWTNSRRNRGGQSDYMNMTPRRPGLTRKPYQPYAPARDFAAYRPRAKFSRSAETAANLQDPNQLYNELNLGRREEYDVLEKKRARDPEMGGKQQRRRNPQEGVYNALQKDKMAEAYSEIGTKGERRRGKGHDGLYQGLSTATKDTYDALHMQTLAPR

SEQ ID NO: 276 - protein, 440 aa, Artificial Sequence
  Made in Lab - CAR construct
DAVVTQESALTSSPGETVTLTCRSSTGAVTTSNYASWVQEKPDHLFTGLIGGTNNRAPGVPARFSGSLIGDKAALTITGAQTEDEAIYFCVLWYSDHWVFGGGTKLTVLGGGGGSGGGGSGGGGSGGGGSDVQLQESGPGLVAPSQSLSITCTVSGFLLTDYGVNWVRQSPGKGLEWLGVIWGDGITDYNSALKSRLSVTKDNSKSQVFLKMNSLQSGDSARYYCVTGLFDYWGQGTTLTVSSESKYGPPCPPCPFWALVVVAGVLFCYGLLVTVALCVIWTKWIRKKFPHIFKQPFKKTTGAAQEEDACSCRCPQEEEGGGGGYELRAKFSRSAETAANLQDPNQLYNELNLGRREEYDVLEKKRARDPEMGGKQQRRRNPQEGVYNALQKDKMAEAYSEIGTKGERRRGKGHDGLYQGLSTATKDTYDALHMQTLAPR

SEQ ID NO: 277 - protein, 481 aa, Artificial Sequence
  Made in Lab - CAR construct
DAVVTQESALTSSPGETVTLTCRSSTGAVTTSNYASWVQEKPDHLFTGLIGGTNNRAPGVPARFSGSLIGDKAALTITGAQTEDEAIYFCVLWYSDHWVFGGGTKLTVLGGGGGSGGGGSGGGGSGGGGSDVQLQESGPGLVAPSQSLSITCTVSGFLLTDYGVNWVRQSPGKGLEWLGVIWGDGITDYNSALKSRLSVTKDNSKSQVFLKMNSLQSGDSARYYCVTGLFDYWGQGTTLTVSSESKYGPPCPPCPFWALVVVAGVLFCYGLLVTVALCVIWTNSRRNRGGQSDYMNMTPRRPGLTRKPYQPYAPARDFAAYRPKWIRKKFPHIFKQPFKKTTGAAQEEDACSCRCPQEEEGGGGGYELRAKFSRSAETAANLQDPNQLYNELNLGRREEYDVLEKKRARDPEMGGKQQRRRNPQEGVYNALQKDKMAEAYSEIGTKGERRRGKGHDGLYQGLSTATKDTYDALHMQTLAPR

SEQ ID NO: 278 - protein, 464 aa, Artificial Sequence
  Made in Lab - CAR construct
DAVVTQESALTSSPGETVTLTCRSSTGAVTTSNYASWVQEKPDHLFTGLIGGTNNRAPGVPARFSGSLIGDKAALTITGAQTEDEAIYFCVLWYSDHWVFGGGTKLTVLGGGGGSGGGGSGGGGSGGGGSDVQLQESGPGLVAPSQSLSITCTVSGFLLTDYGVNWVRQSPGKGLEWLGVIWGDGITDYNSALKSRLSVTKDNSKSQVFLKMNSLQSGDSARYYCVTGLFDYWGQGTTLTVSSTTTKPVLRTPSPVHPTGTSQPQRPEDCRPRGSVKGTGLDFACDIYIWAPLAGICVALLLSLIITLICNSRRNRGGQSDYMNMTPRRPGLTRKPYQPYAPARDFAAYRPRAKFSRSAETAANLQDPNQLFNELNLGRREEFDVLEKKRARDPEMGGKQQRRRNPQEGVYNALQKDKMAEAYSEIGTKGERRRGKGHDGLFQGLSTATKDTFDALHMQTLAPR

SEQ ID NO: 279 - protein, 468 aa, Artificial Sequence
  Made in Lab - CAR construct
DAVVTQESALTSSPGETVTLTCRSSTGAVTTSNYASWVQEKPDHLFTGLIGGTNNRAPGVPARFSGSLIGDKAALTITGAQTEDEAIYFCVLWYSDHWVFGGGTKLTVLGGGGGSGGGGSGGGGSGGGGSDVQLQESGPGLVAPSQSLSITCTVSGFLLTDYGVNWVRQSPGKGLEWLGVIWGDGITDYNSALKSRLSVTKDNSKSQVFLKMNSLQSGDSARYYCVTGLFDYWGQGTTLTVSSTTTKPVLRTPSPVHPTGTSQPQRPEDCRPRGSVKGTGLDFACDIYIWAPLAGICVALLLSLIITLICKWIRKKFPHIFKQPFKKTTGAAQEEDACSCRCPQEEEGGGGGYELRAKFSRSAETAANLQDPNQLFNELNLGRREEFDVLEKKRARDPEMGGKQQRRRNPQEGVYNALQKDKMAEAYSEIGTKGERRRGKGHDGLFQGLSTATKDTFDALHMQTLAPR

SEQ ID NO: 280 - protein, 509 aa, Artificial Sequence
  Made in Lab - CAR construct
DAVVTQESALTSSPGETVTLTCRSSTGAVTTSNYASWVQEKPDHLFTGLIGGTNNRAPGVPARFSGSLIGDKAALTITGAQTEDEAIYFCVLWYSDHWVFGGGTKLTVLGGGGGSGGGGSGGGGSGGGGSDVQLQESGPGLVAPSQSLSITCTVSGFLLTDYGVNWVRQSPGKGLEWLGVIWGDGITDYNSALKSRLSVTKDNSKSQVFLKMNSLQSGDSARYYCVTGLFDYWGQGTTLTVSSTTTKPVLRTPSPVHPTGTSQPQRPEDCRPRGSVKGTGLDFACDIYIWAPLAGICVALLLSLIITLICNSRRNRGGQSDYMNMTPRRPGLTRKPYQPYAPARDFAAYRPKWIRKKFPHIFKQPFKKTTGAAQEEDACSCRCPQEEEGGGGGYELRAKFSRSAETAANLQDPNQLFNELNLGRREEFDVLEKKRARDPEMGGKQQRRRNPQEGVYNALQKDKMAEAYSEIGTKGERRRGKGHDGLFQGLSTATKDTFDALHMQTLAPR

SEQ ID NO: 281 - protein, 464 aa, Artificial Sequence
  Made in Lab - CAR construct
DAVVTQESALTSSPGETVTLTCRSSTGAVTTSNYASWVQEKPDHLFTGLIGGTNNRAPGVPARFSGSLIGDKAALTITGAQTEDEAIYFCVLWYSDHWVFGGGTKLTVLGGGGGSGGGGSGGGGSGGGGSDVQLQESGPGLVAPSQSLSITCTVSGFLLTDYGVNWVRQSPGKGLEWLGVIWGDGITDYNSALKSRLSVTKDNSKSQVFLKMNSLQSGDSARYYCVTGLFDYWGQGTTLTVSSTTTKPVLRTPSPVHPTGTSQPQRPEDCRPRGSVKGTGLDFACDIYIWAPLAGICVALLLSLIITLICNSRRNRGGQSDYMNMTPRRPGLTRKPYQPYAPARDFAAYRPRAKFSRSAETAANLQDPNQLYNELNLGRREEYDVLEKKRARDPEMGGKQQRRRNPQEGVYNALQKDKMAEAYSEIGTKGERRRGKGHDGLYQGLSTATKDTYDALHMQTLAPR

SEQ ID NO: 282 - protein, 468 aa, Artificial Sequence
  Made in Lab - CAR construct
DAVVTQESALTSSPGETVTLTCRSSTGAVTTSNYASWVQEKPDHLFTGLIGGTNNRAPGVPARFSGSLIGDKAALTITGAQTEDEAIYFCVLWYSDHWVFGGGTKLTVLGGGGGSGGGGSGGGGSGGGGSDVQLQESGPGLVAPSQSLSITCTVSGFLLTDYGVNWVRQSPGKGLEWLGVIWGDGITDYNSALKSRLSVTKDNSKSQVFLKMNSLQSGDSARYYCVTGLFDYWGQGTTLTVSSTTTKPVLRTPSPVHPTGTSQPQRPEDCRPRGSVKGTGLDFACDIYIWAPLAGICVALLLSLIITLICKWIRKKFPHIFKQPFKKTTGAAQEEDACSCRCPQEEEGGGGGYELRAKFSRSAETAANLQDPNQLYNELNLGRREEYDVLEKKRARDPEMGGKQQRRRNPQEGVYNALQKDKMAEAYSEIGTKGERRRGKGHDGLYQGLSTATKDTYDALHMQTLAPR

SEQ ID NO: 283 - protein, 509 aa, Artificial Sequence
  Made in Lab - CAR construct
DAVVTQESALTSSPGETVTLTCRSSTGAVTTSNYASWVQEKPDHLFTGLIGGTNNRAPGVPARFSGSLIGDKAALTITGAQTEDEAIYFCVLWYSDHWVFGGGTKLTVLGGGGGSGGGGSGGGGSGGGGSDVQLQESGPGLVAPSQSLSITCTVSGFLLTDYGVNWVRQSPGKGLEWLGVIWGDGITDYNSALKSRLSVTKDNSKSQVFLKMNSLQSGDSARYYCVTGLFDYWGQGTTLTVSSTTTKPVLRTPSPVHPTGTSQPQRPEDCRPRGSVKGTGLDFACDIYIWAPLAGICVALLLSLIITLICNSRRNRGGQSDYMNMTPRRPGLTRKPYQPYAPARDFAAYRPKWIRKKFPHIFKQPFKKTTGAAQEEDACSCRCPQEEEGGGGGYELRAKFSRSAETAANLQDPNQLYNELNLGRREEYDVLEKKRARDPEMGGKQQRRRNPQEGVYNALQKDKMAEAYSEIGTKGERRRGKGHDGLYQGLSTATKDTYDALHMQTLAPR

SEQ ID NO: 284 - protein, 433 aa, Artificial Sequence
  Made in Lab - CAR construct
DAVVTQESALTSSPGETVTLTCRSSTGAVTTSNYASWVQEKPDHLFTGLIGGTNNRAPGVPARFSGSLIGDKAALTITGAQTEDEAIYFCVLWYSDHWVFGGGTKLTVLGGGGGSGGGGSGGGGSGGGGSDVQLQESGPGLVAPSQSLSITCTVSGFLLTDYGVNWVRQSPGKGLEWLGVIWGDGITDYNSALKSRLSVTKDNSKSQVFLKMNSLQSGDSARYYCVTGLFDYWGQGTTLTVSSESKYGPPCPPCPIYIWAPLAGICVALLLSLIITLICNSRRNRGGQSDYMNMTPRRPGLTRKPYQPYAPARDFAAYRPRAKFSRSAETAANLQDPNQLFNELNLGRREEFDVLEKKRARDPEMGGKQQRRRNPQEGVYNALQKDKMAEAYSEIGTKGERRRGKGHDGLFQGLSTATKDTFDALHMQTLAPR

SEQ ID NO: 285 - protein, 437 aa, Artificial Sequence
  Made in Lab - CAR construct
DAVVTQESALTSSPGETVTLTCRSSTGAVTTSNYASWVQEKPDHLFTGLIGGTNNRAPGVPARFSGSLIGDKAALTITGAQTEDEAIYFCVLWYSDHWVFGGGTKLTVLGGGGGSGGGGSGGGGSGGGGSDVQLQESGPGLVAPSQSLSITCTVSGFLLTDYGVNWVRQSPGKGLEWLGVIWGDGITDYNSALKSRLSVTKDNSKSQVFLKMNSLQSGDSARYYCVTGLFDYWGQGTTLTVSSESKYGPPCPPCPIYIWAPLAGICVALLLSLIITLICKWIRKKFPHIFKQPFKKTTGAAQEEDACSCRCPQEEEGGGGGYELRAKFSRSAETAANLQDPNQLFNELNLGRREEFDVLEKKRARDPEMGGKQQRRRNPQEGVYNALQKDKMAEAYSEIGTKGERRRGKGHDGLFQGLSTATKDTFDALHMQTLAPR

SEQ ID NO: 286 - protein, 478 aa, Artificial Sequence
  Made in Lab - CAR construct
DAVVTQESALTSSPGETVTLTCRSSTGAVTTSNYASWVQEKPDHLFTGLIGGTNNRAPGVPARFSGSLIGDKAALTITGAQTEDEAIYFCVLWYSDHWVFGGGTKLTVLGGGGGSGGGGSGGGGSGGGGSDVQLQESGPGLVAPSQSLSITCTVSGFLLTDYGVNWVRQSPGKGLEWLGVIWGDGITDYNSALKSRLSVTKDNSKSQVFLKMNSLQSGDSARYYCVTGLFDYWGQGTTLTVSSESKYGPPCPPCPIYIWAPLAGICVALLLSLIITLICNSRRNRGGQSDYMNMTPRRPGLTRKPYQPYAPARDFAAYRPKWIRKKFPHIFKQPFKKTTGAAQEEDACSCRCPQEEEGGGGGYELRAKFSRSAETAANLQDPNQLFNELNLGRREEFDVLEKKRARDPEMGGKQQRRRNPQEGVYNALQKDKMAEAYSEIGTKGERRRGKGHDGLFQGLSTATKDTFDALHMQTLAPR

SEQ ID NO: 287 - protein, 433 aa, Artificial Sequence
  Made in Lab - CAR construct
DAVVTQESALTSSPGETVTLTCRSSTGAVTTSNYASWVQEKPDHLFTGLIGGTNNRAPGVPARFSGSLIGDKAALTITGAQTEDEAIYFCVLWYSDHWVFGGGTKLTVLGGGGGSGGGGSGGGGSGGGGSDVQLQESGPGLVAPSQSLSITCTVSGFLLTDYGVNWVRQSPGKGLEWLGVIWGDGITDYNSALKSRLSVTKDNSKSQVFLKMNSLQSGDSARYYCVTGLFDYWGQGTTLTVSSESKYGPPCPPCPIYIWAPLAGICVALLLSLIITLICNSRRNRGGQSDYMNMTPRRPGLTRKPYQPYAPARDFAAYRPRAKFSRSAETAANLQDPNQLYNELNLGRREEYDVLEKKRARDPEMGGKQQRRRNPQEGVYNALQKDKMAEAYSEIGTKGERRRGKGHDGLYQGLSTATKDTYDALHMQTLAPR

SEQ ID NO: 288 - protein, 437 aa, Artificial Sequence
  Made in Lab - CAR construct
DAVVTQESALTSSPGETVTLTCRSSTGAVTTSNYASWVQEKPDHLFTGLIGGTNNRAPGVPARFSGSLIGDKAALTITGAQTEDEAIYFCVLWYSDHWVFGGGTKLTVLGGGGGSGGGGSGGGGSGGGGSDVQLQESGPGLVAPSQSLSITCTVSGFLLTDYGVNWVRQSPGKGLEWLGVIWGDGITDYNSALKSRLSVTKDNSKSQVFLKMNSLQSGDSARYYCVTGLFDYWGQGTTLTVSSESKYGPPCPPCPIYIWAPLAGICVALLLSLIITLICKWIRKKFPHIFKQPFKKTTGAAQEEDACSCRCPQEEEGGGGGYELRAKFSRSAETAANLQDPNQLYNELNLGRREEYDVLEKKRARDPEMGGKQQRRRNPQEGVYNALQKDKMAEAYSEIGTKGERRRGKGHDGLYQGLSTATKDTYDALHMQTLAPR

SEQ ID NO: 289 - protein, 478 aa, Artificial Sequence
  Made in Lab - CAR construct
DAVVTQESALTSSPGETVTLTCRSSTGAVTTSNYASWVQEKPDHLFTGLIGGTNNRAPGVPARFSGSLIGDKAALTITGAQTEDEAIYFCVLWYSDHWVFGGGTKLTVLGGGGGSGGGGSGGGGSGGGGSDVQLQESGPGLVAPSQSLSITCTVSGFLLTDYGVNWVRQSPGKGLEWLGVIWGDGITDYNSALKSRLSVTKDNSKSQVFLKMNSLQSGDSARYYCVTGLFDYWGQGTTLTVSSESKYGPPCPPCPIYIWAPLAGICVALLLSLIITLICNSRRNRGGQSDYMNMTPRRPGLTRKPYQPYAPARDFAAYRPKWIRKKFPHIFKQPFKKTTGAAQEEDACSCRCPQEEEGGGGGYELRAKFSRSAETAANLQDPNQLYNELNLGRREEYDVLEKKRARDPEMGGKQQRRRNPQEGVYNALQKDKMAEAYSEIGTKGERRRGKGHDGLYQGLSTATKDTYDALHMQTLAPR

SEQ ID NO: 290 - protein, 243 aa, Artificial Sequence
  Made in Lab - Humanized scFv fragments
DAVVTQESALTSSPGETVTLTCRSSTGAVTTSNYASWVQEKPDHLFTGLIGGTNNRAPGVPARFSGSLIGDKAALTITGAQTEDEAIYFCVLWYSDHWVFGGGTKLTVLGGGGGSGGGGSGGGGSGGGGSDVQLQESGPGLVAPSQSLSITCTVSGFLLTDYGVNWVRQSPGKGLEWLGVIWGDGITDYNSALKSRLSVTKDNSKSQVFLKMNSLQSGDSARYYCVTGLFDYWGQGTTLTVSS

SEQ ID NO: 291 - protein, 243 aa, Artificial Sequence
  Made in Lab - Humanized scFv fragments
QAVVTQEPSLTVSPGGTVTLTCRSSTGAVTTSNYASWFQQKPGQAPRTLIYGTNNRAPWTPARFSGSLLGGKAALTLSGAQPEDEAEYYCVLWYSDHWVFGGGTKLTVLGGGGGSGGGGSGGGGSGGGGSQVQLQESGPGLVKPSETLSLTCTVSGFLLTDYGVNWIRQPPGKGLEWIGVIWGDGITDYNPSLKSRVTISVDTSKNQFSLKLSSVTAADTAVYYCARGLFDYWGQGTLVTVSS

SEQ ID NO: 292 - protein, 243 aa, Artificial Sequence
  Made in Lab - Humanized scFv fragments
QAVVTQEPSLTVSPGGTVTLTCGSSTGAVTTSNYASWVQQKPGQAPRGLIGGTNNRAPGVPARFSGSLLGGKAALTISGAQPEDEAEYYCVLWYSDHWVFGGGTKLTVLGGGGGSGGGGSGGGGSGGGGSQVQLQESGPGLVKPSETLSLTCTVSGFLLTDYGVNWIRQPPGKGLEWIGVIWGDGITDYNPSLKSRVTISKDTSKNQFSLKLSSVTAADTAVYYCVTGLFDYWGQGTLVTVSS

SEQ ID NO: 293 - protein, 243 aa, Artificial Sequence
  Made in Lab - Humanized scFv fragments
QAVVTQEPSLTVSPGGTVTLTCGSSTGAVTTSNYASWVQQKPGQAPRGLIGGTNNRAPGVPARFSGSLLGGKAALTISGAQPEDEAEYYCVLWYSDHWVFGGGTKLTVLGGGGGSGGGGSGGGGSGGGGSQVQLQESGPGLVKPSETLSLTCTVSGFLLTDYGVNWIRQPPGKGLEWIGVIWGDGITDYNPSLKSRVTISKDNSKNQFSLKLSSVTAADTAVYYCVTGLFDYWGQGTLVTVSS

SEQ ID NO: 294 - protein, 243 aa, Artificial Sequence
  Made in Lab - Humanized scFv fragments
QAVVTQEPSLTVSPGGTVTLTCGSSTGAVTTSNYASWVQQKPGQAPRGLIGGTNNRAPGVPARFSGSLLGGKAALTISGAQPEDEAEYYCVLWYSDHWVFGGGTKLTVLGGGGGSGGGGSGGGGSGGGGSQVQLQESGPGLVKPSETLSITCTVSGFLLTDYGVNWVRQPPGKGLEWLGVIWGDGITDYNPSLKSRLTVSKDTSKNQVSLKMSSLTAADTAVYYCVTGLFDYWGQGTLLTVSS

SEQ ID NO: 295 - protein, 243 aa, Artificial Sequence
  Made in Lab - Humanized scFv fragments
QAVVTQEPSLTVSPGGTVTLTCGSSTGAVTTSNYASWVQQKPGQAPRGLIGGTNNRAPGVPARFSGSLLGGKAALTISGAQPEDEAEYYCVLWYSDHWVFGGGTKLTVLGGGGGSGGGGSGGGGSGGGGSQVQLQESGPGLVKPSETLSITCTVSGFLLTDYGVNWVRQPPGKGLEWLGVIWGDGITDYNPSLKSRLTVSKDNSKNQVSLKMSSLTAADTAVYYCVTGLFDYWGQGTLLTVSS

SEQ ID NO: 296 - protein, 243 aa, Artificial Sequence
  Made in Lab - Humanized scFv fragments
QAVVTQEPSLTVSPGGTVTLTCGSSTGAVTTSNYASWVQQKPGQAPRGLIGGTNNRAPGVPARFSGSLLGGKAALTISGAQPEDEAEYYCVLWYSDHWVFGGGTKLTVLGGGGGSGGGGSGGGGSGGGGSQVQLQESGPGLVKPSETLSITCTVSGFLLTDYGVNWVRQPPGKGLEWLGVIWGDGITDYNPSLKSRLTVSKDTSKNQVSLKMSSLTAADTARYYCVTGLFDYWGQGTTLTVSS

SEQ ID NO: 297 - protein, 243 aa, Artificial Sequence
  Made in Lab - Humanized scFv fragments
QAVVTQEPSLTVSPGGTVTLTCGSSTGAVTTSNYASWVQQKPGQAPRGLIGGTNNRAPGVPARFSGSLLGGKAALTISGAQPEDEAEYYCVLWYSDHWVFGGGTKLTVLGGGGGSGGGGSGGGGSGGGGSQVQLQESGPGLVKPSETLSITCTVSGFLLTDYGVNWVRQPPGKGLEWLGVIWGDGITDYNPSLKSRLTVSKDTSKNQVSLKMSSLTDADTARYYCVTGLFDYWGQGTTLTVSS

SEQ ID NO: 298 - protein, 243 aa, Artificial Sequence
  Made in Lab - Humanized scFv fragments
QAVVTQEPSLTVSPGGTVTLTCGSSTGAVTTSNYASWVQQKPGQAPRGLIGGTNNRAPGVPARFSGSLLGGKAALTISGAQPEDEAEYYCVLWYSDHWVFGGGTKLTVLGGGGGSGGGGSGGGGSGGGGSQVQLQQSGPGLVKPSETLSITCTVSGFLLTDYGVNWVRQPPGKGLEWLGVIWGDGITDYNPSLKSRLTVSKDNSKNQVSLKMSSLTAADTAVYYCVTGLFDYWGQGTLLTVSS

SEQ ID NO: 299 - protein, 243 aa, Artificial Sequence
  Made in Lab - Humanized scFv fragments
QAVVTQEPSLTVSPGGTVTLTCGSSTGAVTTSNYASWVQQKPGQAPRGLIGGTNNRAPGVPARFSGSLLGGKAALTISGAQPEDEAEYYCVLWYSDHWVFGGGTKLTVLGGGGGSGGGGSGGGGSGGGGSQVQLQQSGPGLVKPSETLSITCTVSGFSLTDYGVNWVRQPPGKGLEWLGVIWGDGSTDYNPSLKSRLTVSKDNSKNQVSLKMSSLTAADTAVYYCVTGLFDYWGQGTLLTVSS

SEQ ID NO: 300 - protein, 243 aa, Artificial Sequence
  Made in Lab - Humanized scFv fragments
QAVVTQEPSLTVSPGGTVTLTCRSSTGAVTTSNYASWVQQKPGQAPRGLIGGTNNRAPGVPARFSGSLLGGKAALTISGAQPEDEAEYYCVLWYSDHWVFGGGTKLTVLGGGGGSGGGGSGGGGSGGGGSQVQLQESGPGLVKPSETLSITCTVSGFLLTDYGVNWVRQPPGKGLEWLGVIWGDGITDYNPSLKSRLTVSKDNSKNQVSLKMSSLTAADTAVYYCVTGLFDYWGQGTLLTVSS

SEQ ID NO: 301 - protein, 243 aa, Artificial Sequence
  Made in Lab - Humanized scFv fragments
QAVVTQEPSLTVSPGGTVTLTCRSSTGAVTTSNYASWVQQKPGQAPRGLIGGTNNRAPGVPARFSGSLLGGKAALTISGAQPEDEAEYYCVLWYSDHWVFGGGTKLTVLGGGGGSGGGGSGGGGSGGGGSQVQLQQSGPGLVKPSETLSITCTVSGFLLTDYGVNWVRQPPGKGLEWLGVIWGDGITDYNPSLKSRLTVSKDNSKNQVSLKMSSLTAADTAVYYCVTGLFDYWGQGTLLTVSS

SEQ ID NO: 302 - protein, 243 aa, Artificial Sequence
  Made in Lab - Humanized scFv fragments
QAVVTQEPSLTVSPGGTVTLTCRSSTGAVTTSNYASWVQQKPGQAPRGLIGGTNNRAPGVPARFSGSLLGGKAALTISGAQPEDEAEYYCVLWYSDHWVFGGGTKLTVLGGGGGSGGGGSGGGGSGGGGSQVQLQQSGPGLVKPSETLSITCTVSGFSLTDYGVNWVRQPPGKGLEWLGVIWGDGSTDYNPSLKSRLTVSKDNSKNQVSLKMSSLTAADTAVYYCVTGLFDYWGQGTLLTVSS

SEQ ID NO: 303 - protein, 243 aa, Artificial Sequence
  Made in Lab - Humanized scFv fragments
QAVVTQEPSLTVSPGGTVTLTCGSSTGAVTTSNYASWVQQKPGQAFRGLIGGTNNRAPGVPARFSGSLLGGKAALTISGAQPEDEAEYYCVLWYSDHWVFGGGTKLTVLGGGGGSGGGGSGGGGSGGGGSQVQLQESGPGLVKPSETLSLTCTVSGFLLTDYGVNWIRQPPGKGLEWIGVIWGDGITDYNPSLKSRVTISKDTSKNQFSLKLSSVTAADTAVYYCVTGLFDYWGQGTLVTVSS

SEQ ID NO: 304 - protein, 243 aa, Artificial Sequence
  Made in Lab - Humanized scFv fragments
QAVVTQEPSLTVSPGGTVTLTCGSSTGAVTTSNYASWVQQKPGQAFRGLIGGTNNRAPGVPARFSGSLLGGKAALTISGAQPEDEAEYYCVLWYSDHWVFGGGTKLTVLGGGGGSGGGGSGGGGSGGGGSQVQLQESGPGLVKPSETLSITCTVSGFLLTDYGVNWVRQPPGKGLEWLGVIWGDGITDYNPSLKSRLTVSKDTSKNQVSLKMSSLTAADTAVYYCVTGLFDYWGQGTLLTVSS

SEQ ID NO: 305 - protein, 243 aa, Artificial Sequence
  Made in Lab - Humanized scFv fragments
QAVVTQEPSLTVSPGGTVTLTCGSSTGAVTTSNYASWVQQKPGQAFRGLIGGTNNRAPGVPARFSGSLLGGKAALTISGAQPEDEAEYYCVLWYSDHWVFGGGTKLTVLGGGGGSGGGGSGGGGSGGGGSQVQLQESGPGLVKPSETLSITCTVSGFLLTDYGVNWVRQPPGKGLEWLGVIWGDGITDYNPSLKSRLTVSKDTSKNQVSLKMSSLTDADTARYYCVTGLFDYWGQGTTLTVSS

SEQ ID NO: 306 - protein, 243 aa, Artificial Sequence
  Made in Lab - Humanized scFv fragments
QAVVTQEPSLTVSPGGTVTLTCGSSTGAVTTSNYASWVQQKPDHLFRGLIGGTNNRAPGVPARFSGSLLGGKAALTISGAQPEDEAEYYCVLWYSDHWVFGGGTKLTVLGGGGGSGGGGSGGGGSGGGGSQVQLQESGPGLVKPSETLSLTCTVSGFLLTDYGVNWIRQPPGKGLEWIGVIWGDGITDYNPSLKSRVTISKDTSKNQFSLKLSSVTAADTAVYYCVTGLFDYWGQGTLVTVSS

SEQ ID NO: 307 - protein, 243 aa, Artificial Sequence
  Made in Lab - Humanized scFv fragments
QAVVTQEPSLTVSPGGTVTLTCGSSTGAVTTSNYASWVQQKPDHLFRGLIGGTNNRAPGVPARFSGSLLGGKAALTISGAQPEDEAEYYCVLWYSDHWVFGGGTKLTVLGGGGGSGGGGSGGGGSGGGGSQVQLQESGPGLVKPSETLSITCTVSGFLLTDYGVNWVRQPPGKGLEWLGVIWGDGITDYNPSLKSRLTVSKDTSKNQVSLKMSSLTAADTAVYYCVTGLFDYWGQGTLLTVSS

SEQ ID NO: 308 - protein, 243 aa, Artificial Sequence
  Made in Lab - Humanized scFv fragments
QAVVTQEPSLTVSPGGTVTLTCGSSTGAVTTSNYASWVQQKPDHLFRGLIGGTNNRAPGVPARFSGSLLGGKAALTISGAQPEDEAEYYCVLWYSDHWVFGGGTKLTVLGGGGGSGGGGSGGGGSGGGGSQVQLQESGPGLVKPSETLSITCTVSGFLLTDYGVNWVRQPPGKGLEWLGVIWGDGITDYNPSLKSRLTVSKDTSKNQVSLKMSSLTAADTARYYCVTGLFDYWGQGTTLTVSS

SEQ ID NO: 309 - protein, 243 aa, Artificial Sequence
  Made in Lab - Humanized scFv fragments
QAVVTQEPSLTVSPGGTVTLTCGSSTGAVTTSNYASWVQQKPDHLFRGLIGGTNNRAPGVPARFSGSLLGGKAALTISGAQPEDEAEYYCVLWYSDHWVFGGGTKLTVLGGGGGSGGGGSGGGGSGGGGSQVQLQESGPGLVKPSETLSITCTVSGFLLTDYGVNWVRQPPGKGLEWLGVIWGDGITDYNPSLKSRLTVSKDTSKNQVSLKMSSLTDADTARYYCVTGLFDYWGQGTTLTVSS

SEQ ID NO: 310 - protein, 243 aa, Artificial Sequence
  Made in Lab - Humanized scFv fragments
QAVVTQEPSLTVSPGGTVTLTCGSSTGAVTTSNYASWVQQKPDHLFRGLIGGTNNRAPGVPARFSGSLIGDKAALTISGAQPEDEAEYYCVLWYSDHWVFGGGTKLTVLGGGGGSGGGGSGGGGSGGGGSQVQLQESGPGLVKPSETLSITCTVSGFLLTDYGVNWVRQPPGKGLEWLGVIWGDGITDYNPSLKSRLTVSKDTSKNQVSLKMSSLTAADTARYYCVTGLFDYWGQGTTLTVSS

SEQ ID NO: 311 - protein, 243 aa, Artificial Sequence
  Made in Lab - Humanized scFv fragments
QAVVTQEPSLTVSPGGTVTLTCRSSTGAVTTSNYASWVQQKPDHLFRGLIGGTNNRAPGVPARFSGSLIGDKAALTISGAQPEDEAEYYCVLWYSDHWVFGGGTKLTVLGGGGGSGGGGSGGGGSGGGGSQVQLQESGPGLVKPSETLSITCTVSGFLLTDYGVNWVRQPPGKGLEWLGVIWGDGITDYNPSLKSRLTVSKDTSKNQVSLKMSSLTAADTARYYCVTGLFDYWGQGTTLTVSS

SEQ ID NO: 312 - protein, 243 aa, Artificial Sequence
  Made in Lab - Humanized scFv fragments
QAVVTQEPSLTVSPGGTVTLTCRSSTGAVTTSNYASWVQQKPDHLFRGLIGGTNNRAPGVPARFSGSLLGGKAALTISGAQPEDEAEYYCVLWYSDHWVFGGGTKLTVLGGGGGSGGGGSGGGGSGGGGSQVQLQESGPGLVKPSETLSITCTVSGFLLTDYGVNWVRQPPGKGLEWLGVIWGDGITDYNPSLKSRLTVSKDTSKNQVSLKMSSLTAADTARYYCVTGLFDYWGQGTTLTVSS

SEQ ID NO: 313 - protein, 243 aa, Artificial Sequence
  Made in Lab - Humanized scFv fragments
QAVVTQEPSLTVSPGGTVTLTCRSSTGAVTTSNYASWVQQKPDHLFRGLIGGTNNRAPGVPARFSGSLLGGKAALTISGAQPEDEAEYYCVLWYSDHWVFGGGTKLTVLGGGGGSGGGGSGGGGSGGGGSQVQLQQSGPGLVKPSETLSITCTVSGFLLTDYGVNWVRQPPGKGLEWLGVIWGDGITDYNPSLKSRLTVSKDTSKNQVSLKMSSLTAADTARYYCVTGLFDYWGQGTTLTVSS

SEQ ID NO: 314 - protein, 243 aa, Artificial Sequence
  Made in Lab - Humanized scFv fragments
QAVVTQEPSLTVSPGGTVTLTCGSSTGAVTTSNYASWVQEKPDHLFRGLIGGTNNRAPGVPARFSGSLLGGKAALTISGAQPEDEAIYFCVLWYSDHWVFGGGTKLTVLGGGGGSGGGGSGGGGSGGGGSQVQLQESGPGLVKPSETLSITCTVSGFLLTDYGVNWVRQPPGKGLEWLGVIWGDGITDYNPSLKSRLTVSKDTSKNQVSLKMSSLTAADTARYYCVTGLFDYWGQGTTLTVSS

SEQ ID NO: 315 - protein, 243 aa, Artificial Sequence
  Made in Lab - Humanized scFv fragments
QAVVTQEPSLTVSPGGTVTLTCGSSTGAVTTSNYASWVQEKPDHLFRGLIGGTNNRAPGVPARFSGSLLGGKAALTISGAQPEDEAIYFCVLWYSDHWVFGGGTKLTVLGGGGGSGGGGSGGGGSGGGGSQVQLQQSGPGLVKPSETLSITCTVSGFLLTDYGVNWVRQPPGKGLEWLGVIWGDGITDYNPSLKSRLTVSKDTSKNQVSLKMSSLTAADTARYYCVTGLFDYWGQGTTLTVSS

SEQ ID NO: 316 - protein, 243 aa, Artificial Sequence
  Made in Lab - Humanized scFv fragments
QAVVTQEPSLTVSPGGTVTLTCGSSTGAVTTSNYASWVQEKPDHLFRGLIGGTNNRAPGVPARFSGSLLGGKAALTISGAQPEDEAIYFCVLWYSDHWVFGGGTKLTVLGGGGGSGGGGSGGGGSGGGGSQVQLQESGPGLVKPSETLSITCTVSGFLLTDYGVNWVRQPPGKGLEWLGVIWGDGITDYNPSLKSRLTVSKDTSKNQVSLKMSSLTDADTARYYCVTGLFDYWGQGTTLTVSS

SEQ ID NO: 317 - protein, 243 aa, Artificial Sequence
  Made in Lab - Humanized scFv fragments
QAVVTQEPSLTVSPGGTVTLTCGSSTGAVTTSNYASWVQEKPDHLFRGLIGGTNNRAPGVPARFSGSLLGGKAALTISGAQPEDEAIYFCVLWYSDHWVFGGGTKLTVLGGGGGSGGGGSGGGGSGGGGSQVQLQQSGPGLVKPSETLSITCTVSGFLLTDYGVNWVRQPPGKGLEWLGVIWGDGITDYNPSLKSRLTVSKDTSKNQVSLKMSSLTDADTARYYCVTGLFDYWGQGTTLTVSS

SEQ ID NO: 318 - protein, 243 aa, Artificial Sequence
  Made in Lab - Humanized scFv fragments
QAVVTQEPSLTSSPGGTVTLTCGSSTGAVTTSNYASWVQEKPDHLFRGLIGGTNNRAPGVPARFSGSLLGGKAALTISGAQPEDEAIYFCVLWYSDHWVFGGGTKLTVLGGGGGSGGGGSGGGGSGGGGSQVQLQESGPGLVKPSETLSITCTVSGFLLTDYGVNWVRQPPGKGLEWLGVIWGDGITDYNPSLKSRLTVSKDTSKNQVSLKMSSLTAADTARYYCVTGLFDYWGQGTTLTVSS

SEQ ID NO: 319 - protein, 243 aa, Artificial Sequence
  Made in Lab - Humanized scFv fragments
QAVVTQEPSLTSSPGGTVTLTCGSSTGAVTTSNYASWVQEKPDHLFRGLIGGTNNRAPGVPARFSGSLLGGKAALTISGAQPEDEAIYFCVLWYSDHWVFGGGTKLTVLGGGGGSGGGGSGGGGSGGGGSQVQLQESGPGLVKPSETLSITCTVSGFLLTDYGVNWVRQPPGKGLEWLGVIWGDGITDYNPSLKSRLTVSKDTSKNQVSLKMSSLTDADTARYYCVTGLFDYWGQGTTLTVSS

SEQ ID NO: 320 - protein, 243 aa, Artificial Sequence
  Made in Lab - Humanized scFv fragments
QAVVTQEPSLTVSPGGTVTLTCGSSTGAVTTSNYASWVQEKPDHLFRGLIGGTNNRAPGVPARFSGSLLGGKAALTISGAQPEDEAIYFCVLWYSDHWVFGGGTKLTVDGGGGGSGGGGSGGGGSGGGGSQVQLQESGPGLVKPSETLSITCTVSGFLLTDYGVNWVRQPPGKGLEWLGVIWGDGITDYNPSLKSRLTVSKDTSKNQVSLKMSSLTAADTARYYCVTGLFDYWGQGTTLTVSS

SEQ ID NO: 321 - protein, 243 aa, Artificial Sequence
  Made in Lab - Humanized scFv fragments
QAVVTQEPSLTVSPGGTVTLTCGSSTGAVTTSNYASWVQEKPDHLFRGLIGGTNNRAPGVPARFSGSLLGGKAALTISGAQPEDEAIYFCVLWYSDHWVFGGGTKLTVDGGGGGSGGGGSGGGGSGGGGSQVQLQESGPGLVKPSETLSITCTVSGFLLTDYGVNWVRQPPGKGLEWLGVIWGDGITDYNPSLKSRLTVSKDTSKNQVSLKMSSLTDADTARYYCVTGLFDYWGQGTTLTVSS

SEQ ID NO: 322 - protein, 243 aa, Artificial Sequence
  Made in Lab - Humanized scFv fragments
QAVVTQEPSLTVSPGGTVTLTCGSSTGAVTTSNYASWVQEKPDHLFRGLIGGTNNRAPGVPARFSGSLLGGKAALTISGAQPEDEAIYFCVLWYSDHWVFGGGTKLTVDGGGGGSGGGGSGGGGSGGGGSQVQLQQSGPGLVKPSETLSITCTVSGFLLTDYGVNWVRQPPGKGLEWLGVIWGDGITDYNPSLKSRLTVSKDTSKNQVSLKMSSLTDADTARYYCVTGLFDYWGQGTTLTVSS

SEQ ID NO: 323 - protein, 243 aa, Artificial Sequence
  Made in Lab - Humanized scFv fragments
QAVVTQEPSLTSSPGGTVTLTCGSSTGAVTTSNYASWVQEKPDHLFRGLIGGTNNRAPGVPARFSGSLLGGKAALTISGAQPEDEAIYFCVLWYSDHWVFGGGTKLTVDGGGGGSGGGGSGGGGSGGGGSQVQLQESGPGLVKPSETLSITCTVSGFLLTDYGVNWVRQPPGKGLEWLGVIWGDGITDYNPSLKSRLTVSKDTSKNQVSLKMSSLTDADTARYYCVTGLFDYWGQGTTLTVSS

SEQ ID NO: 324 - protein, 243 aa, Artificial Sequence
  Made in Lab - Humanized scFv fragments
QAVVTQEPSLTSSPGGTVTLTCGSSTGAVTTSNYASWVQEKPDHLFRGLIGGTNNRAPGVPARFSGSLLGGKAALTISGAQPEDEAIYFCVLWYSDHWVFGGGTKLTVDGGGGGSGGGGSGGGGSGGGGSQVQLQQSGPGLVKPSETLSITCTVSGFLLTDYGVNWVRQPPGKGLEWLGVIWGDGITDYNPSLKSRLTVSKDTSKNQVSLKMSSLTDADTARYYCVTGLFDYWGQGTTLTVSS

SEQ ID NO: 325 - protein, 243 aa, Artificial Sequence
  Made in Lab - Humanized scFv fragments
QAVVTQEPSLTSSPGGTVTLTCGSSTGAVTTSNYASWVQQKPDHLFRGLIGGTNNRAPGVPARFSGSLLGGKAALTISGAQPEDEAIYFCVLWYSDHWVFGGGTKLTVDGGGGGSGGGGSGGGGSGGGGSQVQLQQSGPGLVKPSETLSITCTVSGFLLTDYGVNWVRQPPGKGLEWLGVIWGDGITDYNPSLKSRLTVSKDTSKNQVSLKMSSLTDADTARYYCVTGLFDYWGQGTTLTVSS

SEQ ID NO: 326 - protein, 243 aa, Artificial Sequence
  Made in Lab - Humanized scFv fragments
QAVVTQEPSLTSSPGGTVTLTCGSSTGAVTTSNYASWVQEKPDHLFRGLIGGTNNRAPGVPARFSGSLLGGKAALTISGAQPEDEAEYFCVLWYSDHWVFGGGTKLTVDGGGGGSGGGGSGGGGSGGGGSQVQLQQSGPGLVKPSETLSITCTVSGFLLTDYGVNWVRQPPGKGLEWLGVIWGDGITDYNPSLKSRLTVSKDTSKNQVSLKMSSLTDADTARYYCVTGLFDYWGQGTTLTVSS

SEQ ID NO: 327 - protein, 243 aa, Artificial Sequence
  Made in Lab - Humanized scFv fragments
QAVVTQEPSLTSSPGGTVTLTCGSSTGAVTTSNYASWVQEKPDHLFRGLIGGTNNRAPGVPARFSGSLLGGKAALTISGAQPEDEAIYYCVLWYSDHWVFGGGTKLTVDGGGGGSGGGGSGGGGSGGGGSQVQLQQSGPGLVKPSETLSITCTVSGFLLTDYGVNWVRQPPGKGLEWLGVIWGDGITDYNPSLKSRLTVSKDTSKNQVSLKMSSLTDADTARYYCVTGLFDYWGQGTTLTVSS

SEQ ID NO: 328 - protein, 243 aa, Artificial Sequence
  Made in Lab - Humanized scFv fragments
QAVVTQEPSLTSSPGGTVTLTCGSSTGAVTTSNYASWVQQKPDHLFRGLIGGTNNRAPGVPARFSGSLLGGKAALTISGAQPEDEAEYFCVLWYSDHWVFGGGTKLTVDGGGGGSGGGGSGGGGSGGGGSQVQLQQSGPGLVKPSETLSITCTVSGFLLTDYGVNWVRQPPGKGLEWLGVIWGDGITDYNPSLKSRLTVSKDTSKNQVSLKMSSLTDADTARYYCVTGLFDYWGQGTTLTVSS

SEQ ID NO: 329 - protein, 243 aa, Artificial Sequence
  Made in Lab - Humanized scFv fragments
QAVVTQEPSLTSSPGGTVTLTCGSSTGAVTTSNYASWVQQKPDHLFRGLIGGTNNRAPGVPARFSGSLLGGKAALTISGAQPEDEAIYYCVLWYSDHWVFGGGTKLTVDGGGGGSGGGGSGGGGSGGGGSQVQLQQSGPGLVKPSETLSITCTVSGFLLTDYGVNWVRQPPGKGLEWLGVIWGDGITDYNPSLKSRLTVSKDTSKNQVSLKMSSLTDADTARYYCVTGLFDYWGQGTTLTVSS

SEQ ID NO: 330 - protein, 243 aa, Artificial Sequence
  Made in Lab - Humanized scFv fragments
QAVVTQEPSLTSSPGGTVTLTCGSSTGAVTTSNYASWVQEKPDHLFRGLIGGTNNRAPGVPARFSGSLLGGKAALTISGAQPEDEAEYYCVLWYSDHWVFGGGTKLTVDGGGGGSGGGGSGGGGSGGGGSQVQLQQSGPGLVKPSETLSITCTVSGFLLTDYGVNWVRQPPGKGLEWLGVIWGDGITDYNPSLKSRLTVSKDTSKNQVSLKMSSLTDADTARYYCVTGLFDYWGQGTTLTVSS

SEQ ID NO: 331 - protein, 243 aa, Artificial Sequence
  Made in Lab - Humanized scFv fragments
QAVVTQEPSLTSSPGGTVTLTCGSSTGAVTTSNYASWVQQKPDHLFRGLIGGTNNRAPGVPARFSGSLLGGKAALTISGAQPEDEAEYYCVLWYSDHWVFGGGTKLTVDGGGGGSGGGGSGGGGSGGGGSQVQLQQSGPGLVKPSETLSITCTVSGFLLTDYGVNWVRQPPGKGLEWLGVIWGDGITDYNPSLKSRLTVSKDTSKNQVSLKMSSLTDADTARYYCVTGLFDYWGQGTTLTVSS

SEQ ID NO: 332 - protein, 243 aa, Artificial Sequence
  Made in Lab - Humanized scFv fragments
QAVVTQEPSLTVSPGGTVTLTCGSSTGAVTTSNYASWVQEKPDHLFRGLIGGTNNRAPGVPARFSGSLLGGKAALTISGAQPEDEAIYFCVLWYSDHWVFGGGTKLTVDGGGGGSGGGGSGGGGSGGGGSDVQLQESGPGLVAPSQSLSITCTVSGFLLTDYGVNWVRQSPGKGLEWLGVIWGDGITDYNSALKSRLSVTKDNSKSQVFLKMNSLQSGDSARYYCVTGLFDYWGQGTTLTVSS

SEQ ID NO: 333 - protein, 243 aa, Artificial Sequence
  Made in Lab - Humanized scFv fragments
QAVVTQEPSLTSSPGGTVTLTCGSSTGAVTTSNYASWVQEKPDHLFRGLIGGTNNRAPGVPARFSGSLLGGKAALTISGAQPEDEAIYFCVLWYSDHWVFGGGTKLTVDGGGGGSGGGGSGGGGSGGGGSDVQLQESGPGLVAPSQSLSITCTVSGFLLTDYGVNWVRQSPGKGLEWLGVIWGDGITDYNSALKSRLSVTKDNSKSQVFLKMNSLQSGDSARYYCVTGLFDYWGQGTTLTVSS

SEQ ID NO: 334 - protein, 243 aa, Artificial Sequence
  Made in Lab - Humanized scFv fragments
QAVVTQEPSLTSSPGGTVTLTCGSSTGAVTTSNYASWVQEKPDHLFRGLIGGTNNRAPGVPARFSGSLDGGKAALTISGAQPEDEAIYFCVLWYSDHWVFGGGTKLTVSGGGGGSGGGGSGGGGSGGGGSQVQLQESGPGLVKPSETLSITCTVSGFLLTDYGVNWVRQPPGKGLEWLGVIWGDGITDYNPSLKSRLTVSKDTSKNQVSLKMSSLTDADTARYYCVTGLFDYWGQGTTLTVSS

SEQ ID NO: 335 - protein, 243 aa, Artificial Sequence
  Made in Lab - Humanized scFv fragments
QAVVTQEPSLTSSPGGTVTLTCRSSTGAVTTSNYASWVQEKPDHLFRGLIGGTNNRAPGVPARFSGSLLGGKAALTISGAQPEDEAIYFCVLWYSDHWVFGGGTKLTVLGGGGGSGGGGSGGGGSGGGGSQVQLQESGPGLVKPSETLSITCTVSGFLLTDYGVNWVRQPPGKGLEWLGVIWGDGITDYNPSLKSRLTVSKDTSKNQVSLKMSSLTAADTARYYCVTGLFDYWGQGTTLTVSS

SEQ ID NO: 336 - protein, 243 aa, Artificial Sequence
  Made in Lab - Humanized scFv fragments
QAVVTQEPSLTSSPGGTVTLTCRSSTGAVTTSNYASWVQEKPDHLFRGLIGGTNNRAPGVPARFSGSLLGGKAALTISGAQPEDEAIYFCVLWYSDHWVFGGGTKLTVLGGGGGSGGGGSGGGGSGGGGSQVQLQESGPGLVKPSETLSITCTVSGFLLTDYGVNWVRQPPGKGLEWLGVIWGDGITDYNPSLKSRLTVSKDTSKNQVSLKMSSLTDADTARYYCVTGLFDYWGQGTTLTVSS

SEQ ID NO: 337 - protein, 243 aa, Artificial Sequence
  Made in Lab - Humanized scFv fragments
QAVVTQEPSLTSSPGGTVTLTCGSSTGAVTTSNYASWVQEKPDHLFRGLIGGTNNRAPGVPARFSGSLDGGKAALTISGAQPEDEAIYFCVLWYSDHWVFGGGTKLTVLGGGGGSGGGGSGGGGSGGGGSQVQLQESGPGLVKPSETLSITCTVSGFLLTDYGVNWVRQPPGKGLEWLGVIWGDGITDYNPSLKSRLTVSKDTSKNQVSLKMSSLTDADTARYYCVTGLFDYWGQGTTLTVSS

SEQ ID NO: 338 - protein, 242 aa, Artificial Sequence
  Made in Lab - Humanized scFv fragments
QAVVTQEPSLTVSPGGTVTLTCGSSTGAVTTSNYASWVQEKPDHLFRGLIGGTNNRAPGVPARFSGSLLGGKAALTISGAQPEDEAIYFCVLWYSDHWVFGGGTKLTVGGGGGSGGGGSGGGGSGGGGSQVQLQESGPGLVKPSETLSITCTVSGFLLTDYGVNWVRQPPGKGLEWLGVIWGDGITDYNPSLKSRLTVSKDTSKNQVSLKMSSLTAADTARYYCVTGLFDYWGQGTTLTVSS

SEQ ID NO: 339 - protein, 242 aa, Artificial Sequence
  Made in Lab - Humanized scFv fragments
QAVVTQEPSLTVSPGGTVTLTCGSSTGAVTTSNYASWVQEKPDHLFRGLIGGTNNRAPGVPARFSGSLLGGKAALTISGAQPEDEAIYFCVLWYSDHWVFGGGTKLTVGGGGGSGGGGSGGGGSGGGGSQVQLQESGPGLVKPSETLSITCTVSGFLLTDYGVNWVRQPPGKGLEWLGVIWGDGITDYNPSLKSRLTVSKDTSKNQVSLKMSSLTDADTARYYCVTGLFDYWGQGTTLTVSS

SEQ ID NO: 340 - protein, 243 aa, Artificial Sequence
  Made in Lab - Humanized scFv fragments
QAVVTQEPSLTSSPGGTVTLTCGSSTGAVTTSNYASWVQEKPDHLFRGLIGGTNNRAPGVPARFSGSLDGGKAALTISGAQPEDEAIYFCVLWYSDHWVFGGGTKLTVSGGGGGSGGGGSGGGGSGGGGSDVQLQESGPGLVAPSQSLSITCTVSGFLLTDYGVNWVRQSPGKGLEWLGVIWGDGITDYNSALKSRLSVTKDNSKSQVFLKMNSLQSGDSARYYCVTGLFDYWGQGTTLTVSS

SEQ ID NO: 341 - protein, 243 aa, Artificial Sequence
  Made in Lab - Humanized scFv fragments
QAVVTQEPSLTSSPGGTVTLTCGSSTGAVTTSNYASWVQEKPDHLFRGLIGGTNNRAPGVPARFSGSLLGGKAALTISGAQPEDEAIYFCVLWYSDHWVFGGGTKLTVLGGGGGSGGGGSGGGGSGGGGSDVQLQESGPGLVAPSQSLSITCTVSGFLLTDYGVNWVRQSPGKGLEWLGVIWGDGITDYNSALKSRLSVTKDNSKSQVFLKMNSLQSGDSARYYCVTGLFDYWGQGTTLTVSS

SEQ ID NO: 342 - protein, 243 aa, Artificial Sequence
  Made in Lab - Humanized scFv fragments
QAVVTQEPSLTSSPGGTVTLTCGSSTGAVTTSNYASWVQEKPDHLFRGLIGGTNNRAPGVPARFSGSLLGGKAALTISGAQPEDEAIYFCVLWYSDHWVFGGGTKLTVLGGGGGSGGGGSGGGGSGGGGSQVQLQQSGPGLVKPSETLSITCTVSGFLLTDYGVNWVRQPPGKGLEWLGVIWGDGITDYNPSLKSRLTVSKDTSKNQVSLKMSSLTAADTARYYCVTGLFDYWGQGTTLTVSS

SEQ ID NO: 343 - protein, 243 aa, Artificial Sequence
  Made in Lab - Humanized scFv fragments
QAVVTQEPSLTSSPGGTVTLTCGSSTGAVTTSNYASWVQEKPDHLFRGLIGGTNNRAPGVPARFSGSLDGGKAALTISGAQPEDEAIYFCVLWYSDHWVFGGGTKLTVSGGGGGSGGGGSGGGGSGGGGSQVQLQESGPGLVKPSETLSITCTVSGFLLTDYGVNWVRQPPGKGLEWLGVIWGDGITDYNPSLKSRLTVSKDTSKNQVSLKMSSLTSADTARYYCVTGLFDYWGQGTTLTVSS

SEQ ID NO: 344 - protein, 243 aa, Artificial Sequence
  Made in Lab - Humanized scFv fragments
QAVVTQEPSLTSSPGGTVTLTCGSSTGAVTTSNYASWVQEKPDHLFRGLIGGTNNRAPGVPARFSGSLLGGKAALTISGAQPEDEAIYFCVLWYSDHWVFGGGTKLTVSGGGGGSGGGGSGGGGSGGGGSQVQLQESGPGLVKPSETLSITCTVSGFLLTDYGVNWVRQPPGKGLEWLGVIWGDGITDYNPSLKSRLTVSKDTSKNQVSLKMSSLTAADTARYYCVTGLFDYWGQGTTLTVSS

SEQ ID NO: 345 - protein, 243 aa, Artificial Sequence; identical to SEQ ID NO: 318
  Made in Lab - Humanized scFv fragments

SEQ ID NO: 346 - protein, 243 aa, Artificial Sequence
  Made in Lab - Humanized scFv fragments
QAVVTQEPSLTSSPGGTVTLTCGSSTGAVTTSNYASWVQEKPDHLFRGLIGGTNNRAPGVPARFSGSLLGGKAALTISGAQPEDEAIYFCVLWYSDHWVFGGGTKLTVLGGGGGSGGGGSGGGGSGGGGSQVQLQESGPGLVKPSETLSITCTVSGFLLTDYGVNWVRQPPGKGLEWLGVIWGDGITDYNPSLKSRLTVSKDTSKNQVSLKMSSLTSADTARYYCVTGLFDYWGQGTTLTVSS

SEQ ID NO: 347 - protein, 243 aa, Artificial Sequence
  Made in Lab - Humanized scFv fragments
QAVVTQEPSLTVSPGGTVTLTCRSSTGAVTTSNYASWVQEKPDHLFRGLIGGTNNRAPGVPARFSGSLLGGKAALTISGAQPEDEAIYFCVLWYSDHWVFGGGTKLTVLGGGGGSGGGGSGGGGSGGGGSQVQLQESGPGLVKPSETLSITCTVSGFLLTDYGVNWVRQPPGKGLEWLGVIWGDGITDYNPSLKSRLTVSKDTSKNQVSLKMSSLTAADTARYYCVTGLFDYWGQGTTLTVSS

SEQ ID NO: 348 - protein, 243 aa, Artificial Sequence
  Made in Lab - Humanized scFv fragments
QAVVTQEPSLTVSPGGTVTLTCGSSTGAVTTSNYASWVQEKPDHLFRGLIGGTNNRAPGVPARFSGSLLGGKAALTISGAQPEDEAIYFCVLWYSDHWVFGGGTKLTVLGGGGGSGGGGSGGGGSGGGGSQVQLQQSGPGLVKPSETLSITCTVSGFSLTDYGVNWVRQPPGKGLEWLGVIWGDGSTDYNPSLKSRLTVSKDNSKNQVSLKMSSLTAADTAVYYCVTGLFDYWGQGTLLTVSS

SEQ ID NO: 349 - protein, 243 aa, Artificial Sequence
  Made in Lab - Humanized scFv fragments
QAVVTQEPSLTVSPGGTVTLTCGSSTGAVTTSNYASWVQEKPDHLFRGLIGGTNNRAPGVPARFSGSLLGGKAALTISGAQPEDEAIYFCVLWYSDHWVFGGGTKLTVLGGGGGSGGGGSGGGGSGGGGSQVQLQQSGPGLVKPSETLSITCTVSGFSLTDYGVNWVRQPPGKGLEWLGVIWGDGSTDYNPSLKSRLTVSKDTSKNQVSLKMSSLTAADTAVYYCVTGLFDYWGQGTLLTVSS

SEQ ID NO: 350 - protein, 243 aa, Artificial Sequence
  Made in Lab - Humanized scFv fragments
QAVVTQEPSLTVSPGGTVTLTCGSSTGAVTTSNYASWVQEKPGQAFRGLIGGTNNRAPGVPARFSGSLLGGKAALTISGAQPEDEAIYFCVLWYSDHWVFGGGTKLTVLGGGGGSGGGGSGGGGSGGGGSQVQLQESGPGLVKPSETLSITCTVSGFLLTDYGVNWVRQPPGKGLEWLGVIWGDGITDYNPSLKSRLTVSKDTSKNQVSLKMSSLTAADTARYYCVTGLFDYWGQGTTLTVSS

SEQ ID NO: 351 - protein, 243 aa, Artificial Sequence
  Made in Lab - Humanized scFv fragments
QAVVTQEPSLTVSPGGTVTLTCGSSTGAVTTSNYASWVQEKPGQAFRGLIGGTNNRAPGVPARFSGSLLGGKAALTISGAQPEDEAIYFCVLWYSDHWVFGGGTKLTVLGGGGGSGGGGSGGGGSGGGGSQVQLQQSGPGLVKPSETLSITCTVSGFLLTDYGVNWVRQPPGKGLEWLGVIWGDGITDYNPSLKSRLTVSKDTSKNQVSLKMSSLTAADTARYYCVTGLFDYWGQGTTLTVSS

SEQ ID NO: 352 - protein, 243 aa, Artificial Sequence
  Made in Lab - Humanized scFv fragments
QAVVTQEPSLTVSPGGTVTLTCGSSTGAVTTSNYASWVQEKPGQAPRGLIGGTNNRAPGVPARFSGSLLGGKAALTISGAQPEDEAIYFCVLWYSDHWVFGGGTKLTVLGGGGGSGGGGSGGGGSGGGGSQVQLQESGPGLVKPSETLSITCTVSGFLLTDYGVNWVRQPPGKGLEWLGVIWGDGITDYNPSLKSRLTVSKDTSKNQVSLKMSSLTDADTARYYCVTGLFDYWGQGTTLTVSS

SEQ ID NO: 353 - protein, 243 aa, Artificial Sequence
  Made in Lab - Humanized scFv fragments
QAVVTQEPSLTVSPGGTVTLTCGSSTGAVTTSNYASWVQEKPGQAFRGLIGGTNNRAPGVPARFSGSLLGGKAALTISGAQPEDEAIYFCVLWYSDHWVFGGGTKLTVLGGGGGSGGGGSGGGGSGGGGSQVQLQESGPGLVKPSETLSITCTVSGFLLTDYGVNWVRQPPGKGLEWLGVIWGDGITDYNPSLKSRLTVSKDTSKNQVSLKMSSLTDADTARYYCVTGLFDYWGQGTTLTVSS

SEQ ID NO: 354 - protein, 243 aa, Artificial Sequence
  Made in Lab - Humanized scFv fragments
QAVVTQEPSLTVSPGGTVTLTCGSSTGAVTTSNYASWVQEKPGQAPRGLIGGTNNRAPGVPARFSGSLLGGKAALTISGAQPEDEAIYFCVLWYSDHWVFGGGTKLTVLGGGGGSGGGGSGGGGSGGGGSQVQLQQSGPGLVKPSETLSITCTVSGFSLTDYGVNWVRQPPGKGLEWLGVIWGDGSTDYNPSLKSRLTVSKDNSKNQVSLKMSSLTAADTAVYYCVTGLFDYWGQGTLLTVSS

SEQ ID NO: 355 - protein, 243 aa, Artificial Sequence
  Made in Lab - Humanized scFv fragments
DAVVTQESALTTSPGETVTLTCRSSTGAVTTSNYANWVQEKPDHLFTGLIGGTNNRAPGVPARFSGSLIGDKAALTITGAQTEDEAIYFCALWYSNHWVFGGGTKLTVLGGGGGSGGGGSGGGGSGGGGSDVQLQESGPGLVAPSQSLSITCTVSGFSLTDYGVNWVRQSPGKGLEWLGVIWGDGITDYNSALKSRLSVTKDNSKSQVFLKMNSLQSGDSARYYCVTGLFDYWGQGTTLTVSS

SEQ ID NO: 356 - protein, 243 aa, Artificial Sequence
  Made in Lab - Humanized scFv fragments
DAVVTQESALTSSPGETVTLTCRSSTGAVTTSNYASWVQEKPDHLFTGLIGGTNNRAPGVPARFSGSLIGDKAALTITGAQTEDEAIYFCVLWYSDHWVFGGGTKLTVLGGGGGSGGGGSGGGGSGGGGSQVQLQESGPGLVKPSETLSITCTVSGFLLTDYGVNWVRQPPGKGLEWLGVIWGDGITDYNPSLKSRLTVSKDTSKNQVSLKMSSLTDADTARYYCVTGLFDYWGQGTTLTVSS

SEQ ID NO: 357 - protein, 243 aa, Artificial Sequence
  Made in Lab - Humanized scFv fragments
DAVVTQESALTSSPGETVTLTCRSSTGAVTTSNYASWVQEKPDHLFTGLIGGTNNRAPGVPARFSGSLIGDKAALTITGAQTEDEAIYFCVLWYSDHWVFGGGTKLTVLGGGGGSGGGGSGGGGSGGGGSQVQLQQSGPGLVKPSETLSITCTVSGFLLTDYGVNWVRQPPGKGLEWLGVIWGDGITDYNPSLKSRLTVSKDTSKNQVSLKMSSLTDADTARYYCVTGLFDYWGQGTTLTVSS

SEQ ID NO: 358 - protein, 243 aa, Artificial Sequence
  Made in Lab - Humanized scFv fragments
DAVVTQESALTSSPGETVTLTCRSSTGAVTTSNYASWVQEKPDHLFTGLIGGTNNRAPGVPARFSGSLIGDKAALTITGAQTEDEAIYFCVLWYSDHWVFGGGTKLTVLGGGGGSGGGGSGGGGSGGGGSQVQLQESGPGLVKPSETLSITCTVSGFLLTDYGVNWVRQPPGKGLEWLGVIWGDGITDYNPSLKSRLTVSKDTSKNQVSLKMSSLTSADTARYYCVTGLFDYWGQGTTLTVSS

SEQ ID NO: 359 - protein, 243 aa, Artificial Sequence
  Made in Lab - Humanized scFv fragments
DAVVTQESALTSSPGETVTLTCRSSTGAVTTSNYASWVQEKPDHLFTGLIGGTNNRAPGVPARFSGSLIGDKAALTITGAQTEDEAIYFCVLWYSDHWVFGGGTKLTVLGGGGGSGGGGSGGGGSGGGGSQVQLQESGPGLVKPSETLSITCTVSGFLLTDYGVNWVRQPPGKGLEWLGVIWGDGITDYNPSLKSRLTVSKDTSKNQVSLKMSSLTAADTARYYCVTGLFDYWGQGTTLTVSS

SEQ ID NO: 360 - protein, 243 aa, Artificial Sequence
  Made in Lab - Humanized scFv fragments
QVQLQESGPGLVKPSETLSITCTVSGFLLTDYGVNWVRQPPGKGLEWLGVIWGDGITDYNPSLKSRLTVSKDTSKNQVSLKMSSLTAADTARYYCVTGLFDYWGQGTTLTVSSGGGGSGGGGSGGGGSGGGGSQAVVTQEPSLTVSPGGTVTLTCGSSTGAVTTSNYASWVQEKPDHLFRGLIGGTNNRAPGVPARFSGSLLGGKAALTISGAQPEDEAIYFCVLWYSDHWVFGGGTKLTVLG

SEQ ID NO: 361 - protein, 243 aa, Artificial Sequence
  Made in Lab - Humanized scFv fragments
QVQLQQSGPGLVKPSETLSITCTVSGFLLTDYGVNWVRQPPGKGLEWLGVIWGDGITDYNPSLKSRLTVSKDTSKNQVSLKMSSLTSADTARYYCVTGLFDYWGQGTTLTVSSGGGGSGGGGSGGGGSGGGGSQAVVTQEPSLTVSPGGTVTLTCGSSTGAVTTSNYASWVQEKPDHLFRGLIGGTNNRAPGVPARFSGSLLGGKAALTISGAQPEDEAIYFCVLWYSDHWVFGGGTKLTVLG

SEQ ID NO: 362 - protein, 243 aa, Artificial Sequence
  Made in Lab - Humanized scFv fragments
QVQLQQSGPGLVKPSETLSITCTVSGFLLTDYGVNWVRQPPGKGLEWLGVIWGDGITDYNPSLKSRLTVSKDTSKNQVSLKMSSLTSADTARYYCVTGLFDYWGQGTTLTVSSGGGGSGGGGSGGGGSGGGGSQAVVTQEPSLTVSPGGTVTLTCRSSTGAVTTSNYASWVQEKPDHLFRGLIGGTNNRAPGVPARFSGSLLGGKAALTISGAQPEDEAIYFCVLWYSDHWVFGGGTKLTVLG

SEQ ID NO: 363 - protein, 243 aa, Artificial Sequence
  Made in Lab - Humanized scFv fragments
QVQLQQSGPGLVKPSETLSITCTVSGFSLTDYGVNWVRQPPGKGLEWLGVIWGDGSTDYNPSLKSRLTVSKDNSKNQVSLKMSSLTAADTAVYYCVTGLFDYWGQGTLLTVSSGGGGSGGGGSGGGGSGGGGSQAVVTQEPSLTVSPGGTVTLTCGSSTGAVTTSNYASWVQQKPGQAPRGLIGGTNNRAPGVPARFSGSLLGGKAALTISGAQPEDEAEYYCVLWYSDHWVFGGGTKLTVLG

SEQ ID NO: 364 - protein, 243 aa, Artificial Sequence
  Made in Lab - Humanized scFv fragments
QVQLQESGPGLVKPSETLSITCTVSGFLLTDYGVNWVRQPPGKGLEWLGVIWGDGITDYNPSLKSRLTVSKDNSKNQVSLKMSSLTAADTAVYYCVTGLFDYWGQGTLLTVSSGGGGSGGGGSGGGGSGGGGSQAVVTQEPSLTVSPGGTVTLTCGSSTGAVTTSNYASWVQQKPGQAPRGLIGGTNNRAPGVPARFSGSLLGGKAALTISGAQPEDEAEYYCVLWYSDHWVFGGGTKLTVLG

SEQ ID NO: 365 - protein, 243 aa, Artificial Sequence
  Made in Lab - Humanized scFv fragments
QVQLQQSGPGLVKPSETLSITCTVSGFLLTDYGVNWVRQPPGKGLEWLGVIWGDGITDYNPSLKSRLTVSKDNSKNQVSLKMSSLTAADTAVYYCVTGLFDYWGQGTLLTVSSGGGGSGGGGSGGGGSGGGGSQAVVTQEPSLTVSPGGTVTLTCGSSTGAVTTSNYASWVQQKPGQAPRGLIGGTNNRAPGVPARFSGSLLGGKAALTISGAQPEDEAEYYCVLWYSDHWVFGGGTKLTVLG

SEQ ID NO: 366 - protein, 243 aa, Artificial Sequence
  Made in Lab - Humanized scFv fragments
QVQLQESGPGLVKPSETLSITCTVSGFLLTDYGVNWVRQPPGKGLEWLGVIWGDGITDYNPSLKSRLTVSKDTSKNQVSLKMSSLTAADTARYYCVTGLFDYWGQGTTLTVSSGGGGSGGGGSGGGGSGGGGSQAVVTQEPSLTVSPGGTVTLTCRSSTGAVTTSNYASWVQEKPDHLFRGLIGGTNNRAPGVPARFSGSLLGGKAALTISGAQPEDEAIYFCVLWYSDHWVFGGGTKLTVLG

SEQ ID NO: 367 - protein, 243 aa, Artificial Sequence
  Made in Lab - Humanized scFv fragments
QVQLQQSGPGLVKPSETLSITCTVSGFSLTDYGVNWVRQPPGKGLEWLGVIWGDGSTDYNPSLKSRLTVSKDNSKNQVSLKMSSLTAADTAVYYCVTGLFDYWGQGTLLTVSSGGGGSGGGGSGGGGSGGGGSQAVVTQEPSLTVSPGGTVTLTCRSSTGAVTTSNYASWVQQKPGQAPRGLIGGTNNRAPGVPARFSGSLLGGKAALTISGAQPEDEAEYYCVLWYSDHWVFGGGTKLTVLG

SEQ ID NO: 368 - protein, 243 aa, Artificial Sequence
  Made in Lab - Humanized scFv fragments
QVQLQESGPGLVKPSETLSITCTVSGFLLTDYGVNWVRQPPGKGLEWLGVIWGDGITDYNPSLKSRLTVSKDNSKNQVSLKMSSLTAADTAVYYCVTGLFDYWGQGTLLTVSSGGGGGSGGGGSGGGGSGGGGSQAVVTQEPSLTVSPGGTVTLTCRSSTGAVTTSNYASWVQQKPGQAPRGLIGGTNNRAPGVPARFSGSLLGGKAALTISGAQPEDEAEYYCVLWYSDHWVFGGGTKLTVL

SEQ ID NO: 369 - protein, 243 aa, Artificial Sequence
  Made in Lab - Humanized scFv fragments
QVQLQQSGPGLVKPSETLSITCTVSGFLLTDYGVNWVRQPPGKGLEWLGVIWGDGITDYNPSLKSRLTVSKDNSKNQVSLKMSSLTAADTAVYYCVTGLFDYWGQGTLLTVSSGGGGGSGGGGSGGGGSGGGGSQAVVTQEPSLTVSPGGTVTLTCRSSTGAVTTSNYASWVQQKPGQAPRGLIGGTNNRAPGVPARFSGSLLGGKAALTISGAQPEDEAEYYCVLWYSDHWVFGGGTKLTVL

SEQ ID NO: 370 - protein, 243 aa, Artificial Sequence
  Made in Lab - Humanized scFv fragments
QVQLQESGPGLVKPSETLSITCTVSGFLLTDYGVNWVRQPPGKGLEWLGVIWGDGITDYNPSLKSRLTVSKDTSKNQVSLKMSSLTSADTARYYCVTGLFDYWGQGTTLTVSSGGGGSGGGGSGGGGSGGGGSQAVVTQEPSLTSSPGGTVTLTCGSSTGAVTTSNYASWVQEKPDHLFRGLIGGTNNRAPGVPARFSGSLDGGKAALTISGAQPEDEAIYFCVLWYSDHWVFGGGTKLTVSG

SEQ ID NO: 371 - protein, 243 aa, Artificial Sequence
  Made in Lab - Humanized scFv fragments
QVQLQQSGPGLVKPSETLSITCTVSGFLLTDYGVNWVRQPPGKGLEWLGVIWGDGITDYNPSLKSRLTVSKDTSKNQVSLKMSSLTAADTARYYCVTGLFDYWGQGTTLTVSSGGGGSGGGGSGGGGSGGGGSQAVVTQEPSLTVSPGGTVTLTCGSSTGAVTTSNYASWVQEKPDHLFRGLIGGTNNRAPGVPARFSGSLLGGKAALTISGAQPEDEAIYFCVLWYSDHWVFGGGTKLTVLG

SEQ ID NO: 372 - protein, 243 aa, Artificial Sequence
  Made in Lab - Humanized scFv fragments
QVQLQQSGPGLVKPSETLSITCTVSGFLLTDYGVNWVRQPPGKGLEWLGVIWGDGITDYNPSLKSRLTVSKDTSKNQVSLKMSSLTAADTARYYCVTGLFDYWGQGTTLTVSSGGGGSGGGGSGGGGSGGGGSQAVVTQEPSLTVSPGGTVTLTCGSSTGAVTTSNYASWVQEKPDHLFRGLIGGTNNRAPGVPARFSGSLLGGKAALTISGAQPEDEAIYFCVLWYSDHWVFGGGTKLTVDG

SEQ ID NO: 373 - protein, 243 aa, Artificial Sequence
  Made in Lab - Humanized scFv fragments
DVQLQESGPGLVAPSQSLSITCTVSGFLLTDYGVNWVRQSPGKGLEWLGVIWGDGITDYNSALKSRLSVTKDNSKSQVFLKMNSLQSGDSARYYCVTGLFDYWGQGTTLTVSSGGGGSGGGGSGGGGSGGGGSDAVVTQESALTSSPGETVTLTCRSSTGAVTTSNYASWVQEKPDHLFTGLIGGTNNRAPGVPARFSGSLIGDKAALTITGAQTEDEAIYFCVLWYSDHWVFGGGTKLTVLG

SEQ ID NO: 374 - protein, 243 aa, Artificial Sequence
  Made in Lab - Humanized scFv fragments
QVQLQQSGPGLVKPSETLSITCTVSGFLLTDYGVNWVRQPPGKGLEWLGVIWGDGITDYNPSLKSRLTVSKDTSKNQVSLKMSSLTAADTARYYCVTGLFDYWGQGTTLTVSSGGGGSGGGGSGGGGSGGGGSDAVVTQESALTSSPGETVTLTCRSSTGAVTTSNYASWVQEKPDHLFTGLIGGTNNRAPGVPARFSGSLIGDKAALTITGAQTEDEAIYFCVLWYSDHWVFGGGTKLTVLG

SEQ ID NO: 375 - protein, 243 aa, Artificial Sequence
  Made in Lab - Humanized scFv fragments
DVQLQESGPGLVAPSQSLSITCTVSGFLLTDYGVNWVRQSPGKGLEWLGVIWGDGITDYNSALKSRLSVTKDNSKSQVFLKMNSLQSGDSARYYCVTGLFDYWGQGTTLTVSSGGGGSGGGGSGGGGSGGGGSQAVVTQEPSLTVSPGGTVTLTCGSSTGAVTTSNYASWVQEKPDHLFRGLIGGTNNRAPGVPARFSGSLLGGKAALTISGAQPEDEAIYFCVLWYSDHWVFGGGTKLTVLG

SEQ ID NO: 376 - protein, 245 aa, Artificial Sequence
  Made in Lab - Humanized scFv fragments
DIVMTQSPSSLSASVGDRVTITCRSSTGAVTTSNYASWVQEKPGKLFKGLIGGTNNRAPGVPSRFSGSLIGDKATLTISSLQPEDFATYFCALWYSNHWVFGQGTKVELKRGGGGGSGGGGSGGGGSGGGGSEVKLLESGGGLVQPGGSLKLSCAVSGFSLTDYGVNWVRQAPGRGLEWIGVIWGDGITDYNSALKDRFIISKDNGKNTVYLQMSKVRSDDTALYYCVTGLFDYWGQGTLVTVSS

SEQ ID NO: 377 - protein, 245 aa, Artificial Sequence
  Made in Lab - Humanized scFv fragments
DIVMTQSPSSLSASVGDRVTITCRSSTGAVTTSNYASWVQEKPGKLFKGLIGGTNNRAPGVPSRFSGSLIGDKATLTISSLQPEDFATYFCALWYSNHWVFGQGTKVELKRGGGGGSGGGGSGGGGSGGGGSEVKLLESGGGLVQPGGSLKLSCAVSGFSLTDYGVNWVRQAPGRGLEWIGVIWGDGITDYNSALKDRFIISKDDCENTVYLQMSKVRSDDTALYYCVTGLFDYWGQGTLVTVSS

SEQ ID NO: 378 - protein, 245 aa, Artificial Sequence
  Made in Lab - Humanized scFv fragments
DIVMTQSPSSLSASVGDRVTITCRSSTGAVTTSNYASWVQEKPGKLFKGLIGGTNNRAPGVPSRFSGSLIGDKATLTISSLQPEDFATYYCALWYSNHWVFGQGTKVELKRGGGGGSGGGGSGGGGSGGGGSEVKLLESGGGLVQPGGSLKLSCAVSGFSLTDYGVNWVRQAPGRGLEWIGVIWGDGTTDYNSALKDRFIISKDDCENTVYLQMSKVRSDDTALYYCVTGLFDYWGQGTLVTVSS

SEQ ID NO: 379 - protein, 245 aa, Artificial Sequence
  Made in Lab - Humanized scFv fragments
DIVMTQSPSSLSASVGDRVTITCRSSTGAVTTSNYASWVQEKPGKLFKGLIGGTNNRAPGVPSRFSGSLIGDKATLTISSLQPEDFATYYCALWYSNHWVFGQGTKVELKRGGGGGSGGGGSGGGGSGGGGSEVKLLESGGGLVQPGGSLKLSCAVSGFSLTDYGVNWVRQAPGRGLEWIGVIWGDGTTDYNSALKDRFIISKDDSENTVYLQMSKVRSDDTALYYCVTGLFDYWGQGTLVTVSS

SEQ ID NO: 380 - protein, 243 aa, Artificial Sequence
  Made in Lab - Humanized scFv fragments
DIQMTQSPSSLSASVGDRVTITCRSSTGAVTTSNYASWVQQKPGKAFKGLIGGTNNRAPGVPSRFSGSGSGTDATLTISSLQPEDFATYYCALWYSNHWVFGQGTKVELKGGGGSGGGGSGGGGSSGGGSEVQLVESGGGLVQPGGSLRLSCAVSGFSLTDYGVNWVRQAPGKGLEWIGVIWGDGTTDYADSLKGRFTISKDDSKNTVYLQMNSVRAEDTAVYYCVTGLFDYWGQGTLVTVSS

SEQ ID NO: 381 - protein, 243 aa, Artificial Sequence
  Made in Lab - Humanized scFv fragments
DIQMTQSPSSLSASVGDRVTITCRSSTGAVTTSNYASWVQQKPGKAFKGLIGGTNNRAPGVPSRFSGSLIGDKATLTISSLQPEDFATYYCALWYSNHWVFGQGTKVELKGGGGSGGGGSGGGGSSGGGSEVQLVESGGGLVQPGGSLRLSCAVSGFSLTDYGVNWVRQAPGKGLEWIGVIWGDGTTDYADSLKGRFTISKDDSKNTVYLQMNSVRAEDTAVYYCVTGLFDYWGQGTLVTVSS

SEQ ID NO: 382 - protein, 243 aa, Artificial Sequence
  Made in Lab - Humanized scFv fragments
DIQMTQSPSSLSASVGDRVTITCRSSTGAVTTSNYASWVQQKPGKAFKGLIGGTNNRAPGVPSRFSGSLLGGKATLTISSLQPEDFATYYCALWYSNHWVFGQGTKVELKGGGGSGGGGSGGGGSSGGGSEVQLVESGGGLVQPGGSLRLSCAVSGFSLTDYGVNWVRQAPGKGLEWIGVIWGDGTTDYADSLKGRFTISKDDSKNTVYLQMNSVRAEDTAVYYCVTGLFDYWGQGTLVTVSS

SEQ ID NO: 383 - protein, 243 aa, Artificial Sequence
  Made in Lab - Humanized scFv fragments
DIQMTQSPSSLSASVGDRVTITCRSSTGAVTTSNYASWVQQKPGKAFKGLIGGTNNRAPGVPSRFSGSLSGGKATLTISSLQPEDFATYYCALWYSNHWVFGQGTKVELKGGGGSGGGGSGGGGSSGGGSEVQLVESGGGLVQPGGSLRLSCAVSGFSLTDYGVNWVRQAPGKGLEWIGVIWGDGTTDYADSLKGRFTISKDDSKNTVYLQMNSVRAEDTAVYYCVTGLFDYWGQGTLVTVSS

SEQ ID NO: 384 - protein, 243 aa, Artificial Sequence
  Made in Lab - Humanized scFv fragments
DIQMTQSPSSLSASVGDRVTITCRSSTGAVTTSNYASWVQQKPGKAFKGLIGGTNNRAPGVPSRFSGSGSGTDATLTISSLQPEDFATYYCALWYSNHWVFGQGTKVELKGGGGSGGGGSGGGGSSGGGSEVQLVESGGGLVQPGGSLRLSCAVSGFSLTDYGVNWVRQAPGKGLEWLGVIWGDGTTDYADSLKGRFTISKDNSKNTVYLQMNSLRAEDTAVYYCVTGLFDYWGQGTLLTVSS

SEQ ID NO: 385 - protein, 243 aa, Artificial Sequence
  Made in Lab - Humanized scFv fragments
DIQMTQSPSSLSASVGDRVTITCRSSTGAVTTSNYASWVQQKPGKAFKGLIGGTNNRAPGVPSRFSGSLIGDKATLTISSLQPEDFATYYCALWYSNHWVFGQGTKVELKGGGGSGGGGSGGGGSSGGGSEVQLVESGGGLVQPGGSLRLSCAVSGFSLTDYGVNWVRQAPGKGLEWLGVIWGDGTTDYADSLKGRFTISKDNSKNTVYLQMNSLRAEDTAVYYCVTGLFDYWGQGTLLTVSS

SEQ ID NO: 386 - protein, 243 aa, Artificial Sequence
  Made in Lab - Humanized scFv fragments
DIQMTQSPSSLSASVGDRVTITCRSSTGAVTTSNYASWVQQKPGKAFKGLIGGTNNRAPGVPSRFSGSLLGGKATLTISSLQPEDFATYYCALWYSNHWVFGQGTKVELKGGGGSGGGGSGGGGSSGGGSEVQLVESGGGLVQPGGSLRLSCAVSGFSLTDYGVNWVRQAPGKGLEWLGVIWGDGTTDYADSLKGRFTISKDNSKNTVYLQMNSLRAEDTAVYYCVTGLFDYWGQGTLLTVSS

SEQ ID NO: 387 - protein, 243 aa, Artificial Sequence
  Made in Lab - Humanized scFv fragments
DIQMTQSPSSLSASVGDRVTITCRSSTGAVTTSNYASWVQQKPGKAFKGLIGGTNNRAPGVPSRFSGSLSGGKATLTISSLQPEDFATYYCALWYSNHWVFGQGTKVELKGGGGSGGGGSGGGGSSGGGSEVQLVESGGGLVQPGGSLRLSCAVSGFSLTDYGVNWVRQAPGKGLEWLGVIWGDGTTDYADSLKGRFTISKDNSKNTVYLQMNSLRAEDTAVYYCVTGLFDYWGQGTLLTVSS

SEQ ID NO: 388 - protein, 243 aa, Artificial Sequence
  Made in Lab - Humanized scFv fragments
EVQLVESGGGLVQPGGSLRLSCAASGFSLTDYGVNWVRQAPGKGLEWVSVIWGDGTTDYADSVKGRFTISRDNSKNTLYLQMNSLRAEDTAVYYCARGLFDYWGQGTLVTVSSGGGGSGGGGSGGGGSSGGGSDIQMTQSPSSLSASVGDRVTITCRSSTGAVTTSNYASWYQQKPGKAPKLLIYGTNNRAPGVPSRFSGSGSGTDFTLTISSLQPEDFATYYCALWYSNHWVFGQGTKVEIK

SEQ ID NO: 389 - protein, 434 aa, Artificial Sequence
  Made in Lab - CAR construct
DAVVTQESALTSSPGETVTLTCRSSTGAVTTSNYASWVQEKPDHLFTGLIGGTNNRAPGVPARFSGSLIGDKAALTITGAQTEDEAIYFCVLWYSDHWVFGGGTKLTVLGGGGGSGGGGSGGGGSGGGGSDVQLQESGPGLVAPSQSLSITCTVSGFLLTDYGVNWVRQSPGKGLEWLGVIWGDGITDYNSALKSRLSVTKDNSKSQVFLKMNSLQSGDSARYYCVTGLFDYWGQGTTLTVSSESKYGPPCPPCPDIYIWAPLAGTCGVLLLSLVITLYCKRGRKKLLYIFKQPFMRPVQTTQEEDGCSCRFPEEEEGGCELRVKFSRSADAPAYKQGQNQLYNELNLGRREEYDVLDKRRGRDPEMGGKPRRKNPQEGLYNELQKDKMAEAYSEIGMKGERRRGKGHDGLYQGLSTATKDTYDALHMQALPPR

SEQ ID NO: 390 - protein, 437 aa, Artificial Sequence
  Made in Lab - CAR construct
DAVVTQESALTSSPGETVTLTCRSSTGAVTTSNYASWVQEKPDHLFTGLIGGTNNRAPGVPARFSGSLIGDKAALTITGAQTEDEAIYFCVLWYSDHWVFGGGTKLTVLGGGGGSGGGGSGGGGSGGGGSDVQLQESGPGLVAPSQSLSITCTVSGFLLTDYGVNWVRQSPGKGLEWLGVIWGDGITDYNSALKSRLSVTKDNSKSQVFLKMNSLQSGDSARYYCVTGLFDYWGQGTTLTVSSESKYGPPCPPCPDFWVLVVVGGVLACYSLLVTVAFIIFWVKRGRKKLLYIFKQPFMRPVQTTQEEDGCSCRFPEEEEGGCELRVKFSRSADAPAYKQGQNQLYNELNLGRREEYDVLDKRRGRDPEMGGKPRRKNPQEGLYNELQKDKMAEAYSEIGMKGERRRGKGHDGLYQGLSTATKDTYDALHMQALPPR

SEQ ID NO: 391 - protein, 436 aa, Artificial Sequence
  Made in Lab - CAR construct
DAVVTQESALTSSPGETVTLTCRSSTGAVTTSNYASWVQEKPDHLFTGLIGGTNNRAPGVPARFSGSLIGDKAALTITGAQTEDEAIYFCVLWYSDHWVFGGGTKLTVLGGGGGSGGGGSGGGGSGGGGSDVQLQESGPGLVAPSQSLSITCTVSGFLLTDYGVNWVRQSPGKGLEWLGVIWGDGITDYNSALKSRLSVTKDNSKSQVFLKMNSLQSGDSARYYCVTGLFDYWGQGTTLTVSSESKYGPPCPPCPDFWVLVVVGGVLACYSLLVTVAFIIFWVRSKRSRLLHSDYMNMTPRRPGPTRKHYQPYAPPRDFAAYRSRVKFSRSADAPAYKQGQNQLYNELNLGRREEYDVLDKRRGRDPEMGGKPRRKNPQEGLYNELQKDKMAEAYSEIGMKGERRRGKGHDGLYQGLSTATKDTYDALHMQALPPR

SEQ ID NO: 392 - protein, 462 aa, Artificial Sequence
  Made in Lab - CAR construct
DAVVTQESALTSSPGETVTLTCRSSTGAVTTSNYASWVQEKPDHLFTGLIGGTNNRAPGVPARFSGSLIGDKAALTITGAQTEDEAIYFCVLWYSDHWVFGGGTKLTVLGGGGGSGGGGSGGGGSGGGGSDVQLQESGPGLVAPSQSLSITCTVSGFLLTDYGVNWVRQSPGKGLEWLGVIWGDGITDYNSALKSRLSVTKDNSKSQVFLKMNSLQSGDSARYYCVTGLFDYWGQGTTLTVSSIEVMYPPPYLDNEKSNGTIIHVKGKHLCPSPLFPGPSKPFWVLVVVGGVLACYSLLVTVAFIIFWVRSKRSRLLHSDYMNMTPRRPGPTRKHYQPYAPPRDFAAYRSRVKFSRSADAPAYKQGQNQLYNELNLGRREEYDVLDKRRGRDPEMGGKPRRKNPQEGLYNELQKDKMAEAYSEIGMKGERRRGKGHDGLYQGLSTATKDTYDALHMQALPPR

SEQ ID NO: 393 - protein, 478 aa, Artificial Sequence
  Made in Lab - CAR construct
DAVVTQESALTSSPGETVTLTCRSSTGAVTTSNYASWVQEKPDHLFTGLIGGTNNRAPGVPARFSGSLIGDKAALTITGAQTEDEAIYFCVLWYSDHWVFGGGTKLTVLGGGGGSGGGGSGGGGSGGGGSDVQLQESGPGLVAPSQSLSITCTVSGFLLTDYGVNWVRQSPGKGLEWLGVIWGDGITDYNSALKSRLSVTKDNSKSQVFLKMNSLQSGDSARYYCVTGLFDYWGQGTTLTVSSESKYGPPCPPCPDFWVLVVVGGVLACYSLLVTVAFIIFWVRSKRSRLLHSDYMNMTPRRPGPTRKHYQPYAPPRDFAAYRSKRGRKKLLYIFKQPFMRPVQTTQEEDGCSCRFPEEEEGGCELRVKFSRSADAPAYKQGQNQLYNELNLGRREEYDVLDKRRGRDPEMGGKPRRKNPQEGLYNELQKDKMAEAYSEIGMKGERRRGKGHDGLYQGLSTATKDTYDALHMQALPPR

SEQ ID NO: 394 - protein, 504 aa, Artificial Sequence
  Made in Lab - CAR construct
DAVVTQESALTSSPGETVTLTCRSSTGAVTTSNYASWVQEKPDHLFTGLIGGTNNRAPGVPARFSGSLIGDKAALTITGAQTEDEAIYFCVLWYSDHWVFGGGTKLTVLGGGGGSGGGGSGGGGSGGGGSDVQLQESGPGLVAPSQSLSITCTVSGFLLTDYGVNWVRQSPGKGLEWLGVIWGDGITDYNSALKSRLSVTKDNSKSQVFLKMNSLQSGDSARYYCVTGLFDYWGQGTTLTVSSIEVMYPPPYLDNEKSNGTIIHVKGKHLCPSPLFPGPSKPFWVLVVVGGVLACYSLLVTVAFIIFWVRSKRSRLLHSDYMNMTPRRPGPTRKHYQPYAPPRDFAAYRSKRGRKKLLYIFKQPFMRPVQTTQEEDGCSCRFPEEEEGGCELRVKFSRSADAPAYKQGQNQLYNELNLGRREEYDVLDKRRGRDPEMGGKPRRKNPQEGLYNELQKDKMAEAYSEIGMKGERRRGKGHDGLYQGLSTATKDTYDALHMQALPPR

SEQ ID NO: 395 - protein, 467 aa, Artificial Sequence
  Made in Lab - CAR construct
DIQMTQTTSSLSASLGDRVTISCRASQDISKYLNWYQQKPDGTVKLLIYHTSRLHSGVPSRFSGSGSGTDYSLTISNLEQEDIATYFCQQGNTLPYTFGGGTKLEITGGGGSGGGGSGGGGSEVKLQESGPGLVAPSQSLSVTCTVSGVSLPDYGVSWIRQPPRKGLEWLGVIWGSETTYYNSALKSRLTIIKDNSKSQVFLKMNSLQTDDTAIYYCAKHYYYGGSYAMDYWGQGTSVTVSSTTTPAPRPPTPAPTIASQPLSLRPEACRPAAGGAVHTRGLDFACDFWVLVVVGGVLACYSLLVTVAFIIFWVRSKRSRLLHSDYMNMTPRRPGPTRKHYQPYAPPRDFAAYRSRVKFSRSADAPAYKQGQNQLYNELNLGRREEYDVLDKRRGRDPEMGGKPRRKNPQEGLYNELQKDKMAEAYSEIGMKGERRRGKGHDGLYQGLSTATKDTYDALHMQALPPR

SEQ ID NO: 396 - protein, 509 aa, Artificial Sequence
  Made in Lab - CAR construct
DIQMTQTTSSLSASLGDRVTISCRASQDISKYLNWYQQKPDGTVKLLIYHTSRLHSGVPSRFSGSGSGTDYSLTISNLEQEDIATYFCQQGNTLPYTFGGGTKLEITGGGGSGGGGSGGGGSEVKLQESGPGLVAPSQSLSVTCTVSGVSLPDYGVSWIRQPPRKGLEWLGVIWGSETTYYNSALKSRLTIIKDNSKSQVFLKMNSLQTDDTAIYYCAKHYYYGGSYAMDYWGQGTSVTVSSTTTPAPRPPTPAPTIASQPLSLRPEACRPAAGGAVHTRGLDFACDFWVLVVVGGVLACYSLLVTVAFIIFWVRSKRSRLLHSDYMNMTPRRPGPTRKHYQPYAPPRDFAAYRSKRGRKKLLYIFKQPFMRPVQTTQEEDGCSCRFPEEEEGGCELRVKFSRSADAPAYKQGQNQLYNELNLGRREEYDVLDKRRGRDPEMGGKPRRKNPQEGLYNELQKDKMAEAYSEIGMKGERRRGKGHDGLYQGLSTATKDTYDALHMQALPPR

SEQ ID NO: 397 - protein, 465 aa, Artificial Sequence
  Made in Lab - CAR construct
DIQMTQTTSSLSASLGDRVTISCRASQDISKYLNWYQQKPDGTVKLLIYHTSRLHSGVPSRFSGSGSGTDYSLTISNLEQEDIATYFCQQGNTLPYTFGGGTKLEITGGGGSGGGGSGGGGSEVKLQESGPGLVAPSQSLSVTCTVSGVSLPDYGVSWIRQPPRKGLEWLGVIWGSETTYYNSALKSRLTIIKDNSKSQVFLKMNSLQTDDTAIYYCAKHYYYGGSYAMDYWGQGTSVTVSSTTTPAPRPPTPAPTIASQPLSLRPEACRPAAGGAVHTRGLDFACDIYIWAPLAGTCGVLLLSLVITLYCKRGRKKLLYIFKQPFMRPVQTTQEEDGCSCRFPEEEEGGCELRVKFSRSADAPAYKQGQNQLYNELNLGRREEYDVLDKRRGRDPEMGGKPRRKNPQEGLYNELQKDKMAEAYSEIGMKGERRRGKGHDGLYQGLSTATKDTYDALHMQALPPR

SEQ ID NO: 398 - protein, 24 aa, Artificial Sequence
  Made in Lab - CAR construct fragment
IYIWAPLAGTCGVLLLSLVITLYC

SEQ ID NO: 399 - protein, 478 aa, Artificial Sequence; identical to SEQ ID NO: 393
  Made in Lab - CAR construct

SEQ ID NO: 400 - DNA, 1434 bp, Artificial Sequence
  Made in Lab - CAR construct
gacgccgttgtgacccaggaatccgctctgacctcttctccaggcgaaaccgtgactctgacttgccgtagtagcaccggggctgtgaccacatctaactatgccagttgggtccaggaaaaaccggatcacctgtttactggcctgattggcggcaccaacaatcgcgcaccgggtgtgcccgctcgtttcagcggttccctgattggggacaaggcagcactgactatcaccggcgcccagaccgaagatgaggcgatctatttttgcgtcctgtggtacagcgaccattgggtgttcgggggaggcaccaaactgacagtgctgggcggaggaggaggttcaggaggaggaggtagcgggggaggcggttccgggggaggcggttctgatgtgcagctgcaagaatccgggccaggactggttgcgccttctcagagtctgtcaattacatgtactgttagtggctttctgctgaccgactatggtgtgaactgggttcgtcagagcccaggcaagggtctggagtggctgggagtgatttggggggatggaatcacagactacaatagcgcactgaaatctcggctgagtgttaccaaagataacagcaagtcccaggtcttcctgaagatgaacagcctgcaaagcggcgactccgctcgctattactgcgttaccggactgtttgattattgggggcaggggacaactctgactgtttcctccgaaagcaagtatggcccaccttgtccaccttgtcccgatttttgggttctggtagttgtgggaggtgttctcgcctgttatagtctcctcgttactgtagcgttcatcattttttgggtaaggagtaagaggagcaggctcctgcacagtgactacatgaacatgactccccgccgccccgggcccacccgcaagcattaccagccctatgccccaccacgcgacttcgcagcctatcgctccaaacggggcagaaagaaactcctgtatatattcaaacaaccatttatgagaccagtacaaactactcaagaggaagatggctgtagctgccgatttccagaagaagaagaaggaggatgtgaactgagagtgaagttcagcaggagcgcagacgcccccgcgtacaagcagggccagaaccagctctataacgagctcaatctaggacgaagagaggagtacgatgttttggacaagagacgtggccgggaccctgagatggggggaaagccgagaaggaagaaccctcaggaaggcctgtacaatgaactgcagaaagataagatggcggaggcctacagtgagattgggatgaaaggcgagcgccggaggggcaaggggcacgatggcctttaccagggtctcagtacagccaccaaggacacctacgacgcccttcacatgcaggccctgccccctcgc

SEQ ID NO: 401 - protein, 478 aa, Artificial Sequence
  Made in Lab - CAR construct
QAVVTQEPSLTVSPGGTVTLTCGSSTGAVTTSNYASWVQQKPGQAPRGLIGGTNNRAPGVPARFSGSLLGGKAALTISGAQPEDEAEYYCVLWYSDHWVFGGGTKLTVLGGGGGSGGGGSGGGGSGGGGSQVQLQESGPGLVKPSETLSITCTVSGFLLTDYGVNWVRQPPGKGLEWLGVIWGDGITDYNPSLKSRLTVSKDTSKNQVSLKMSSLTAADTAVYYCVTGLFDYWGQGTLLTVSSESKYGPPCPPCPDFWVLVVVGGVLACYSLLVTVAFIIFWVRSKRSRLLHSDYMNMTPRRPGPTRKHYQPYAPPRDFAAYRSKRGRKKLLYIFKQPFMRPVQTTQEEDGCSCRFPEEEEGGCELRVKFSRSADAPAYKQGQNQLYNELNLGRREEYDVLDKRRGRDPEMGGKPRRKNPQEGLYNELQKDKMAEAYSEIGMKGERRRGKGHDGLYQGLSTATKDTYDALHMQALPPR

SEQ ID NO: 402 - DNA, 1434 bp, Artificial Sequence
  Made in Lab - CAR construct
caggcggtagtcacccaggagccaagtctcacggtgagccccggcggtaccgtcacacttacatgcggaagctctaccggggctgtgaccacaagcaactacgcatcctgggtccagcagaaacccggtcaggcgccccggggcctcattggtgggacaaataacagagccccgggtgttcccgcccgattttctggcagtcttctgggaggaaaggccgctctgacaatatctggcgcacagcccgaagacgaggccgagtactattgcgtgttgtggtatagcgaccactgggtattcggtggaggaacaaagctgacagtgctcggcggaggaggaggttcaggaggaggaggtagcgggggaggcggttccgggggaggcggttctcaagtgcaattgcaggagagtggacctggactcgtgaaaccatctgaaacactctccataacttgtacggtttcagggttcctgctgacagactatggagtaaactgggttaggcagccacccggcaagggcttggagtggctgggcgtcatttggggcgacggaatcaccgactataacccatcactcaaatctcggcttaccgtctccaaggatacgagtaagaatcaggtcagcctgaaaatgtcatccctcacagctgcggacaccgccgtgtactactgtgtgacaggactttttgactactggggccaggggaccctgctcacagttagctccgaaagcaagtatggcccaccttgtccaccttgtcccgatttttgggttctggtagttgtgggaggtgttctcgcctgttatagtctcctcgttactgtagcgttcatcattttttgggtaaggagtaagaggagcaggctcctgcacagtgactacatgaacatgactccacgccgcccaggtcctacacgcaagcattaccagccctatgccccaccacgcgacttcgcagcctatcgctccaaacggggcagaaagaaactcctgtatatattcaaacaaccatttatgagaccagtacaaactactcaagaggaagatggctgtagctgccgatttccagaagaagaagaaggaggatgtgaactgagagtgaagttcagcaggagcgcagacgcccccgcgtacaagcagggccagaaccagctctataacgagctcaatctaggacgaagagaggagtacgatgttttggacaagagacgtggccgggaccctgagatggggggaaagccgagaaggaagaaccctcaggaaggcctgtacaatgaactgcagaaagataagatggcggaggcctacagtgagattgggatgaaaggcgagcgccggaggggcaaggggcacgatggcctttaccagggtctcagtacagccaccaaggacacctacgacgcccttcacatgcaggccctgccccctcgc

SEQ ID NO: 403 - protein, 478 aa, Artificial Sequence
  Made in Lab - CAR construct
QAVVTQEPSLTVSPGGTVTLTCGSSTGAVTTSNYASWVQEKPDHLFRGLIGGTNNRAPGVPARFSGSLLGGKAALTISGAQPEDEAIYFCVLWYSDHWVFGGGTKLTVLGGGGGSGGGGSGGGGSGGGGSQVQLQESGPGLVKPSETLSITCTVSGFLLTDYGVNWVRQPPGKGLEWLGVIWGDGITDYNPSLKSRLTVSKDTSKNQVSLKMSSLTAADTARYYCVTGLFDYWGQGTTLTVSSESKYGPPCPPCPDFWVLVVVGGVLACYSLLVTVAFIIFWVRSKRSRLLHSDYMNMTPRRPGPTRKHYQPYAPPRDFAAYRSKRGRKKLLYIFKQPFMRPVQTTQEEDGCSCRFPEEEEGGCELRVKFSRSADAPAYKQGQNQLYNELNLGRREEYDVLDKRRGRDPEMGGKPRRKNPQEGLYNELQKDKMAEAYSEIGMKGERRRGKGHDGLYQGLSTATKDTYDALHMQALPPR

SEQ ID NO: 404 - DNA, 1434 bp, Artificial Sequence
  Made in Lab - CAR construct
caggctgtggtgactcaagagccctcactgactgtgtccccaggagggacagtcactctcacctgtggctccagcactggagctgtcaccacttccaactatgcctcatgggtgcaggagaagcctgaccacctcttcagggggctgattggtggcacaaacaacagggctcctggggtgcctgcccggttctcaggctccctccttgggggcaaagctgccctgaccatttcgggtgcgcagcctgaggatgaggctatttatttctgcgtgctctggtatagtgaccattgggtgttcggcggagggaccaagctgaccgtcctaggcggcggaggaggttcaggaggaggaggtagcggcggaggcggttccgggggaggaggttctcaggtgcaactgcaggagtcgggcccaggactggtgaagccttcggagaccctgtccatcacctgcactgtctctggtttcctgctgaccgactacggcgtaaactgggtgcggcagcccccagggaagggactggagtggctgggggtgatctggggtgacgggatcaccgactacaacccctccctcaagagtcgactgaccgtgtccaaggacacatccaagaaccaggtgtccctgaagatgagctctctgaccgccgcagacacggcccggtattactgtgtcaccggcctgttcgactactggggccagggcaccaccctgaccgtctcctcagaaagcaagtatggcccgccttgtccaccttgtcccgatttttgggttctggtagttgtgggaggtgttctcgcctgttatagtctcctcgttactgtagcgttcatcattttttgggtaaggagtaagaggagcaggctcctgcacagtgactacatgaacatgactccacgccgcccaggtcctacacgcaagcattaccagccctatgccccaccacgcgacttcgcagcctatcgctccaaacggggcagaaagaaactcctgtatatattcaaacaaccatttatgagaccagtacaaactactcaagaggaagatggctgtagctgccgatttccagaagaagaagaaggaggatgtgaactgagagtgaagttcagcaggagcgcagacgcccccgcgtacaagcagggccagaaccagctctataacgagctcaatctaggacgaagagaggagtacgatgttttggacaagagacgtggccgggaccctgagatggggggaaagccgagaaggaagaaccctcaggaaggcctgtacaatgaactgcagaaagataagatggcggaggcctacagtgagattgggatgaaaggcgagcgccggaggggcaaggggcacgatggcctttaccagggtctcagtacagccaccaaggacacctacgacgcccttcacatgcaggccctgccccctcgc

SEQ ID NO: 405 - protein, 478 aa, Artificial Sequence
  Made in Lab - CAR construct
QAVVTQEPSLTVSPGGTVTLTCGSSTGAVTTSNYASWVQEKPDHLFRGLIGGTNNRAPGVPARFSGSLLGGKAALTISGAQPEDEAIYFCVLWYSDHWVFGGGTKLTVLGGGGGSGGGGSGGGGSGGGGSQVQLQESGPGLVKPSETLSITCTVSGFLLTDYGVNWVRQPPGKGLEWLGVIWGDGITDYNPSLKSRLTVSKDTSKNQVSLKMSSLTDADTARYYCVTGLFDYWGQGTTLTVSSESKYGPPCPPCPDFWVLVVVGGVLACYSLLVTVAFIIFWVRSKRSRLLHSDYMNMTPRRPGPTRKHYQPYAPPRDFAAYRSKRGRKKLLYIFKQPFMRPVQTTQEEDGCSCRFPEEEEGGCELRVKFSRSADAPAYKQGQNQLYNELNLGRREEYDVLDKRRGRDPEMGGKPRRKNPQEGLYNELQKDKMAEAYSEIGMKGERRRGKGHDGLYQGLSTATKDTYDALHMQALPPR

SEQ ID NO: 406 - DNA, 1434 bp, Artificial Sequence
  Made in Lab - CAR construct
caggctgtggtgactcaggagccctcactgactgtgtccccaggagggacagtcactctcacctgtggctccagcactggagctgtcaccacttccaactatgcctcatgggtgcaggagaagcctgaccacctcttcagggggctgattggtggcacaaacaacagggctcctggggtgcctgcccggttctcaggctccctccttgggggcaaagctgccctgaccatttcgggtgcgcagcctgaggatgaggctatttatttctgcgtgctctggtatagtgaccattgggtgttcggcggagggaccaagctgaccgtcctaggcggtggaggaggtagcggcggtgggggatctggaggcgggggttcaggtggtggtgggtctcaggtgcagctgcaggagtcgggcccaggactggtgaagccttcggagaccctgtccatcacctgcactgtctctggtttcctgctgaccgactacggcgtaaactgggtgcggcagcccccagggaagggactggagtggctgggggtgatctggggtgacgggatcaccgactacaacccctccctcaagagtcgactgaccgtgtccaaggacacatccaagaaccaggtgtccctgaagatgagctctctgaccgacgcagacacggcccggtattactgtgtcaccggcctgttcgactactggggccagggcaccaccctgaccgtctcctcagaaagcaagtatggcccaccttgtccaccttgtcccgatttttgggttctggtagttgtgggaggtgttctcgcctgttatagtctcctcgttactgtagcgttcatcattttttgggtaaggagtaagaggagcaggctcctgcacagtgactacatgaacatgactccacgccgcccaggtcctacacgcaagcattaccagccctatgccccaccacgcgacttcgcagcctatcgctccaaacggggcagaaagaaactcctgtatatattcaaacaaccatttatgagaccagtacaaactactcaagaggaagatggctgtagctgccgatttccagaagaagaagaaggaggatgtgaactgagagtgaagttcagcaggagcgcagacgcccccgcgtacaagcagggccagaaccagctctataacgagctcaatctaggacgaagagaggagtacgatgttttggacaagagacgtggccgggaccctgagatggggggaaagccgagaaggaagaaccctcaggaaggcctgtacaatgaactgcagaaagataagatggcggaggcctacagtgagattgggatgaaaggcgagcgccggaggggcaaggggcacgatggcctttaccagggtctcagtacagccaccaaggacacctacgacgcccttcacatgcaggccctgccccctcgc

SEQ ID NO: 407 - protein, 478 aa, Artificial Sequence
  Made in Lab - CAR construct
QAVVTQEPSLTVSPGGTVTLTCGSSTGAVTTSNYASWVQEKPDHLFRGLIGGTNNRAPGVPARFSGSLLGGKAALTISGAQPEDEAIYFCVLWYSDHWVFGGGTKLTVLGGGGGSGGGGSGGGGSGGGGSQVQLQQSGPGLVKPSETLSITCTVSGFLLTDYGVNWVRQPPGKGLEWLGVIWGDGITDYNPSLKSRLTVSKDTSKNQVSLKMSSLTDADTARYYCVTGLFDYWGQGTTLTVSSESKYGPPCPPCPDFWVLVVVGGVLACYSLLVTVAFIIFWVRSKRSRLLHSDYMNMTPRRPGPTRKHYQPYAPPRDFAAYRSKRGRKKLLYIFKQPFMRPVQTTQEEDGCSCRFPEEEEGGCELRVKFSRSADAPAYKQGQNQLYNELNLGRREEYDVLDKRRGRDPEMGGKPRRKNPQEGLYNELQKDKMAEAYSEIGMKGERRRGKGHDGLYQGLSTATKDTYDALHMQALPPR

SEQ ID NO: 408 - DNA, 1434 bp, Artificial Sequence
  Made in Lab - CAR construct
caggctgtggtgactcaggagccctcactgactgtgtccccaggagggacagtcactctcacctgtggctccagcactggagctgtcaccacttccaactatgcctcatgggtgcaggagaagcctgaccacctcttcagggggctgattggtggcacaaacaacagggctcctggggtgcctgcccggttctcaggctccctccttgggggcaaagctgccctgaccatttcgggtgcgcagcctgaggatgaggctatttatttctgcgtgctctggtatagtgaccattgggtgttcggcggagggaccaagctgaccgtcctaggcggtggaggaggtagcggcggtgggggatctggaggcgggggttcaggtggtggtgggtctcaggtgcagctgcagcagtcgggcccaggactggtgaagccttcggagaccctgtccatcacctgcactgtctctggtttcctgctgaccgactacggcgtaaactgggtgcggcagcccccagggaagggactggagtggctgggggtgatctggggtgacgggatcaccgactacaacccctccctcaagagtcgactgaccgtgtccaaggacacatccaagaaccaggtgtccctgaagatgagctctctgaccgacgcagacacggcccggtattactgtgtcaccggcctgttcgactactggggccagggcaccaccctgaccgtctcctcagaaagcaagtatggcccaccttgtccaccttgtcccgatttttgggttctggtagttgtgggaggtgttctcgcctgttatagtctcctcgttactgtagcgttcatcattttttgggtaaggagtaagaggagcaggctcctgcacagtgactacatgaacatgactccacgccgcccaggtcctacacgcaagcattaccagccctatgccccaccacgcgacttcgcagcctatcgctccaaacggggcagaaagaaactcctgtatatattcaaacaaccatttatgagaccagtacaaactactcaagaggaagatggctgtagctgccgatttccagaagaagaagaaggaggatgtgaactgagagtgaagttcagcaggagcgcagacgcccccgcgtacaagcagggccagaaccagctctataacgagctcaatctaggacgaagagaggagtacgatgttttggacaagagacgtggccgggaccctgagatggggggaaagccgagaaggaagaaccctcaggaaggcctgtacaatgaactgcagaaagataagatggcggaggcctacagtgagattgggatgaaaggcgagcgccggaggggcaaggggcacgatggcctttaccagggtctcagtacagccaccaaggacacctacgacgcccttcacatgcaggccctgccccctcgc

SEQ ID NO: 409 - protein, 478 aa, Artificial Sequence
  Made in Lab - CAR construct
QAVVTQEPSLTVSPGGTVTLTCGSSTGAVTTSNYASWVQEKPDHLFRGLIGGTNNRAPGVPARFSGSLLGGKAALTISGAQPEDEAIYFCVLWYSDHWVFGGGTKLTVDGGGGGSGGGGSGGGGSGGGGSQVQLQESGPGLVKPSETLSITCTVSGFLLTDYGVNWVRQPPGKGLEWLGVIWGDGITDYNPSLKSRLTVSKDTSKNQVSLKMSSLTDADTARYYCVTGLFDYWGQGTTLTVSSESKYGPPCPPCPDFWVLVVVGGVLACYSLLVTVAFIIFWVRSKRSRLLHSDYMNMTPRRPGPTRKHYQPYAPPRDFAAYRSKRGRKKLLYIFKQPFMRPVQTTQEEDGCSCRFPEEEEGGCELRVKFSRSADAPAYKQGQNQLYNELNLGRREEYDVLDKRRGRDPEMGGKPRRKNPQEGLYNELQKDKMAEAYSEIGMKGERRRGKGHDGLYQGLSTATKDTYDALHMQALPPR

SEQ ID NO: 410 - DNA, 1434 bp, Artificial Sequence
  Made in Lab - CAR construct
caggctgtggtgactcaggagccctcactgactgtgtccccaggagggacagtcactctcacctgtggctccagcactggagctgtcaccacttccaactatgcctcatgggtgcaggagaagcctgaccacctcttcagggggctgattggtggcacaaacaacagggctcctggggtgcctgcccggttctcaggctccctccttgggggcaaagctgccctgaccatttcgggtgcgcagcctgaggatgaggctatttatttctgcgtgctctggtatagtgaccattgggtgttcggcggagggaccaagctgaccgtcgacggcggtggaggaggtagcggcggtgggggatctggaggcgggggttcaggtggtggtgggtctcaggtgcagctgcaggagtcgggcccaggactggtgaagccttcggagaccctgtccatcacctgcactgtctctggtttcctgctgaccgactacggcgtaaactgggtgcggcagcccccagggaagggactggagtggctgggggtgatctggggtgacgggatcaccgactacaacccctccctcaagagtcgactgaccgtgtccaaggacacatccaagaaccaggtgtccctgaagatgagctctctgaccgacgcagacacggcccggtattactgtgtcaccggcctgttcgactactggggccagggcaccaccctgaccgtctcctcagaaagcaagtatggcccaccttgtccaccttgtcccgatttttgggttctggtagttgtgggaggtgttctcgcctgttatagtctcctcgttactgtagcgttcatcattttttgggtaaggagtaagaggagcaggctcctgcacagtgactacatgaacatgactccacgccgcccaggtcctacacgcaagcattaccagccctatgccccaccacgcgacttcgcagcctatcgctccaaacggggcagaaagaaactcctgtatatattcaaacaaccatttatgagaccagtacaaactactcaagaggaagatggctgtagctgccgatttccagaagaagaagaaggaggatgtgaactgagagtgaagttcagcaggagcgcagacgcccccgcgtacaagcagggccagaaccagctctataacgagctcaatctaggacgaagagaggagtacgatgttttggacaagagacgtggccgggaccctgagatggggggaaagccgagaaggaagaaccctcaggaaggcctgtacaatgaactgcagaaagataagatggcggaggcctacagtgagattgggatgaaaggcgagcgccggaggggcaaggggcacgatggcctttaccagggtctcagtacagccaccaaggacacctacgacgcccttcacatgcaggccctgccccctcgc

SEQ ID NO: 411 - protein, 478 aa, Artificial Sequence
  Made in Lab - CAR construct
QAVVTQEPSLTVSPGGTVTLTCGSSTGAVTTSNYASWVQEKPDHLFRGLIGGTNNRAPGVPARFSGSLLGGKAALTISGAQPEDEAIYFCVLWYSDHWVFGGGTKLTVDGGGGGSGGGGSGGGGSGGGGSQVQLQQSGPGLVKPSETLSITCTVSGFLLTDYGVNWVRQPPGKGLEWLGVIWGDGITDYNPSLKSRLTVSKDTSKNQVSLKMSSLTDADTARYYCVTGLFDYWGQGTTLTVSSESKYGPPCPPCPDFWVLVVVGGVLACYSLLVTVAFIIFWVRSKRSRLLHSDYMNMTPRRPGPTRKHYQPYAPPRDFAAYRSKRGRKKLLYIFKQPFMRPVQTTQEEDGCSCRFPEEEEGGCELRVKFSRSADAPAYKQGQNQLYNELNLGRREEYDVLDKRRGRDPEMGGKPRRKNPQEGLYNELQKDKMAEAYSEIGMKGERRRGKGHDGLYQGLSTATKDTYDALHMQALPPR

SEQ ID NO: 412 - DNA, 1434 bp, Artificial Sequence
  Made in Lab - CAR construct
caggctgtggtgactcaggagccctcactgactgtgtccccaggagggacagtcactctcacctgtggctccagcactggagctgtcaccacttccaactatgcctcatgggtgcaggagaagcctgaccacctcttcagggggctgattggtggcacaaacaacagggctcctggggtgcctgcccggttctcaggctccctccttgggggcaaagctgccctgaccatttcgggtgcgcagcctgaggatgaggctatttatttctgcgtgctctggtatagtgaccattgggtgttcggcggagggaccaagctgaccgtcgacggcggaggaggaggttcaggaggcggaggtagcgggggaggcggttccgggggaggcggttctcaggtgcagctgcagcagtcgggcccaggactggtgaagccttcggagaccctgtccatcacctgcactgtctctggtttcctgctgaccgactacggcgtaaactgggtgcggcagcccccagggaagggactggagtggctgggggtgatctggggtgacgggatcaccgactacaacccctccctcaagagtcgactgaccgtgtccaaggacacatccaagaaccaggtgtccctgaagatgagctctctgaccgatgcagacacggcccggtattactgtgtcaccggcctgttcgactactggggccagggcaccaccctgaccgtctcctcagaaagcaagtatggcccaccttgtccaccttgtcccgatttttgggttctggtagttgtgggaggtgttctcgcctgttatagtctcctcgttactgtagcgttcatcattttttgggtaaggagtaagaggagcaggctcctgcacagtgactacatgaacatgactccacgccgcccaggtcctacacgcaagcattaccagccctatgccccaccacgcgacttcgcagcctatcgctccaaacggggcagaaagaaactcctgtatatattcaaacaaccatttatgagaccagtacaaactactcaagaggaagatggctgtagctgccgatttccagaagaagaagaaggaggatgtgaactgagagtgaagttcagcaggagcgcagacgcccccgcgtacaagcagggccagaaccagctctataacgagctcaatctaggacgaagagaggagtacgatgttttggacaagagacgtggccgggaccctgagatggggggaaagccgagaaggaagaaccctcaggaaggcctgtacaatgaactgcagaaagataagatggcggaggcctacagtgagattgggatgaaaggcgagcgccggaggggcaaggggcacgatggcctttaccagggtctcagtacagccaccaaggacacctacgacgcccttcacatgcaggccctgccccctcgc

SEQ ID NO: 413 - protein, 478 aa, Artificial Sequence
  Made in Lab - CAR construct
QAVVTQEPSLTSSPGGTVTLTCGSSTGAVTTSNYASWVQEKPDHLFRGLIGGTNNRAPGVPARFSGSLLGGKAALTISGAQPEDEAIYFCVLWYSDHWVFGGGTKLTVDGGGGGSGGGGSGGGGSGGGGSQVQLQESGPGLVKPSETLSITCTVSGFLLTDYGVNWVRQPPGKGLEWLGVIWGDGITDYNPSLKSRLTVSKDTSKNQVSLKMSSLTDADTARYYCVTGLFDYWGQGTTLTVSSESKYGPPCPPCPDFWVLVVVGGVLACYSLLVTVAFIIFWVRSKRSRLLHSDYMNMTPRRPGPTRKHYQPYAPPRDFAAYRSKRGRKKLLYIFKQPFMRPVQTTQEEDGCSCRFPEEEEGGCELRVKFSRSADAPAYKQGQNQLYNELNLGRREEYDVLDKRRGRDPEMGGKPRRKNPQEGLYNELQKDKMAEAYSEIGMKGERRRGKGHDGLYQGLSTATKDTYDALHMQALPPR

SEQ ID NO: 414 - DNA, 1434 bp, Artificial Sequence
  Made in Lab - CAR construct
caggctgtggtgactcaggagccctcactgactagctccccaggagggacagtcactctcacctgtggctccagcactggagctgtcaccacttccaactatgcctcatgggtgcaggagaagcctgaccacctcttcagggggctgattggtggcacaaacaacagggctcctggggtgcctgcccggttctcaggctccctccttgggggcaaagctgccctgaccatttcgggtgcgcagcctgaggatgaggctatttatttctgcgtgctctggtatagtgaccattgggtgttcggcggagggaccaagctgaccgtcgacggcggaggaggaggttcaggaggcggaggtagcgggggaggcggttccgggggaggcggttctcaggtgcagctgcaggagtcgggcccaggactggtgaagccttcggagaccctgtccatcacctgcactgtctctggtttcctgctgaccgactacggcgtaaactgggtgcggcagcccccagggaagggactggagtggctgggggtgatctggggtgacgggatcaccgactacaacccctccctcaagagtcgactgaccgtgtccaaggacacatccaagaaccaggtgtccctgaagatgagctctctgaccgatgcagacacggcccggtattactgtgtcaccggcctgttcgactactggggccagggcaccaccctgaccgtctcctcagaaagcaagtatggcccaccttgtccaccttgtcccgatttttgggttctggtagttgtgggaggtgttctcgcctgttatagtctcctcgttactgtagcgttcatcattttttgggtaaggagtaagaggagcaggctcctgcacagtgactacatgaacatgactccacgccgcccaggtcctacacgcaagcattaccagccctatgccccaccacgcgacttcgcagcctatcgctccaaacggggcagaaagaaactcctgtatatattcaaacaaccatttatgagaccagtacaaactactcaagaggaagatggctgtagctgccgatttccagaagaagaagaaggaggatgtgaactgagagtgaagttcagcaggagcgcagacgcccccgcgtacaagcagggccagaaccagctctataacgagctcaatctaggacgaagagaggagtacgatgttttggacaagagacgtggccgggaccctgagatggggggaaagccgagaaggaagaaccctcaggaaggcctgtacaatgaactgcagaaagataagatggcggaggcctacagtgagattgggatgaaaggcgagcgccggaggggcaaggggcacgatggcctttaccagggtctcagtacagccaccaaggacacctacgacgcccttcacatgcaggccctgccccctcgc

SEQ ID NO: 415 - protein, 478 aa, Artificial Sequence
  Made in Lab - CAR construct
QAVVTQEPSLTSSPGGTVTLTCGSSTGAVTTSNYASWVQEKPDHLFRGLIGGTNNRAPGVPARFSGSLLGGKAALTISGAQPEDEAIYFCVLWYSDHWVFGGGTKLTVDGGGGGSGGGGSGGGGSGGGGSQVQLQQSGPGLVKPSETLSITCTVSGFLLTDYGVNWVRQPPGKGLEWLGVIWGDGITDYNPSLKSRLTVSKDTSKNQVSLKMSSLTDADTARYYCVTGLFDYWGQGTTLTVSSESKYGPPCPPCPDFWVLVVVGGVLACYSLLVTVAFIIFWVRSKRSRLLHSDYMNMTPRRPGPTRKHYQPYAPPRDFAAYRSKRGRKKLLYIFKQPFMRPVQTTQEEDGCSCRFPEEEEGGCELRVKFSRSADAPAYKQGQNQLYNELNLGRREEYDVLDKRRGRDPEMGGKPRRKNPQEGLYNELQKDKMAEAYSEIGMKGERRRGKGHDGLYQGLSTATKDTYDALHMQALPPR

SEQ ID NO: 416 - DNA, 1434 bp, Artificial Sequence
  Made in Lab - CAR construct
caggctgtggtgactcaggagccctcactgactagctccccaggagggacagtcactctcacctgtggctccagcactggagctgtcaccacttccaactatgcctcatgggtgcaggagaagcctgaccacctcttcagggggctgattggtggcacaaacaacagggctcctggggtgcctgcccggttctcaggctccctccttgggggcaaagctgccctgaccatttcgggtgcgcagcctgaggatgaggctatttatttctgcgtgctctggtatagtgaccattgggtgttcggcggagggaccaagctgaccgtcgacggcggaggaggaggttcaggaggcggaggtagcgggggaggcggttccgggggaggcggttctcaggtgcagctgcagcagtcgggcccaggactggtgaagccttcggagaccctgtccatcacctgcactgtctctggtttcctgctgaccgactacggcgtaaactgggtgcggcagcccccagggaagggactggagtggctgggggtgatctggggtgacgggatcaccgactacaacccctccctcaagagtcgactgaccgtgtccaaggacacatccaagaaccaggtgtccctgaagatgagctctctgaccgatgcagacacggcccggtattactgtgtcaccggcctgttcgactactggggccagggcaccaccctgaccgtctcctcagaaagcaagtatggcccaccttgtccaccttgtcccgatttttgggttctggtagttgtgggaggtgttctcgcctgttatagtctcctcgttactgtagcgttcatcattttttgggtaaggagtaagaggagcaggctcctgcacagtgactacatgaacatgactccacgccgcccaggtcctacacgcaagcattaccagccctatgccccaccacgcgacttcgcagcctatcgctccaaacggggcagaaagaaactcctgtatatattcaaacaaccatttatgagaccagtacaaactactcaagaggaagatggctgtagctgccgatttccagaagaagaagaaggaggatgtgaactgagagtgaagttcagcaggagcgcagacgcccccgcgtacaagcagggccagaaccagctctataacgagctcaatctaggacgaagagaggagtacgatgttttggacaagagacgtggccgggaccctgagatggggggaaagccgagaaggaagaaccctcaggaaggcctgtacaatgaactgcagaaagataagatggcggaggcctacagtgagattgggatgaaaggcgagcgccggaggggcaaggggcacgatggcctttaccagggtctcagtacagccaccaaggacacctacgacgcccttcacatgcaggccctgccccctcgc

SEQ ID NO: 417 - protein, 27 aa, Artificial Sequence
  Made in Lab - CAR construct fragment
FWVLVVVGGVLACYSLLVTVAFIIFWV

SEQ ID NO: 418 - protein, 41 aa, Artificial Sequence
  Made in Lab - CAR construct fragment
RSKRSRLLHSDYMNMTPRRPGPTRKHYQPYAPPRDFAAYRS

SEQ ID NO: 419 - protein, 42 aa, Artificial Sequence
  Made in Lab - CAR construct fragment
KRGRKKLLYIFKQPFMRPVQTTQEEDGCSCRFPEEEEGGCEL

SEQ ID NO: 420 - protein, 112 aa, Artificial Sequence
  Made in Lab - CAR construct fragment
RVKFSRSADAPAYKQGQNQLYNELNLGRREEYDVLDKRRGRDPEMGGKPRRKNPQEGLYNELQKDKMAEAYSEIGMKGERRRGKGHDGLYQGLSTATKDTYDALHMQALPPR

SEQ ID NO: 421 - protein, 39 aa, Artificial Sequence
  Made in Lab - CAR construct fragment
IEVMYPPPYLDNEKSNGTIIHVKGKHLCPSPLFPGPSKP

SEQ ID NO: 422 - protein, 13 aa, Artificial Sequence
  Made in Lab - CAR construct fragment
ESKYGPPCPPCPD

SEQ ID NO: 423 - protein, 243 aa, Artificial Sequence
  Made in Lab - Humanized scFv fragments
QVQLQESGPGLVKPSETLSITCTVSGFLLTDYGVNWVRQPPGKGLEWLGVIWGDGITDYNPSLKSRLTVSKDTSKNQVSLKMSSLTAADTARYYCVTGLFDYWGQGTTLTVSSGGGGSGGGGSGGGGSGGGGSQAVVTQEPSLTSSPGGTVTLTCGSSTGAVTTSNYASWVQEKPDHLFRGLIGGTNNRAPGVPARFSGSLLGGKAALTISGAQPEDEAIYFCVLWYSDHWVFGGGTKLTVLG
